(19) United States
(12) Patent Application Publication
(10) Pub. No.: US 2025/0179492 A1
(43) Pub. Date: Jun. 5, 2025

(54) COMPOSITIONS OF MODIFIED TREMS AND USES THEREOF

(71) Applicant: Flagship Pioneering Innovations VI, LLC, Cambridge, MA (US)

(72) Inventors: Theonie Anastassiadis, Somerville, MA (US); David Charles Donnell Butler, Medford, MA (US); Neil Kubica, Swampscott, MA (US); Qingyi Li, Somerville, MA (US); Armand Gatien Ngounou Wetie, Woburn, MA (US); Hongchuan Yu, Chestnut Hill, MA (US); William F. Kiesman, Wayland, MA (US); Guangliang Wang, Lexington, MA (US)

(21) Appl. No.: 18/876,922

(22) PCT Filed: Jun. 22, 2023
(86) PCT No.: PCT/US2023/026027

§ 371 Date: Dec. 19, 2024

Related U.S. Application Data
(60) Provisional application No. 63/354,602, filed on Jun. 22, 2022.
(60) Provisional application No. 63/354,604, filed on Jun. 22, 2022.

(51) Int. Cl. C12N 15/113

(52) U.S. Cl. CPC C12N 15/113; C12N 2310/315; C12N 2310/321; C12N 2310/322; C12N 2310/351

(57) ABSTRACT

The invention relates generally to tRNA-based effector molecules (TREMs) comprising an asialoglycoprotein receptor (ASGPR) binding moiety, as well as compositions and methods relating thereto.

### CLAIM OF PRIORITY

[0001] This application claims priority to U.S. Provisional Application No. 63/354,602, filed Jun. 22, 2022; and U.S. Provisional Application No. 63/354,604, filed Jun. 22, 2022. The entire contents of each of the foregoing applications are incorporated herein by reference in their entirety.

### BACKGROUND

[0002] tRNAs are complex RNA molecules that possess a number of functions including the ability to initiate and elongate proteins.

### SUMMARY

[0003] The present disclosure features, inter alia, a tRNA-based effector molecule (TREM) entity comprising an asialoglycoprotein receptor (ASGPR) binding moiety, as well as compositions and methods of use thereof. The ASGPR binding moiety may be conjugated to a sugar moiety (e.g., ribose moiety) of a nucleotide, to a nucleobase of a nucleotide, within an internucleotide linkage (e.g., the phosphate backbone), or at a terminus (e.g., the 5′ or 3′ terminus) of the TREM entity. In an embodiment, the TREM entity comprises a TREM, a TREM Core Fragment, or a TREM Fragment. In an embodiment, the ASGPR binding moiety is bound to a purine nucleobase or a pyrimidine nucleobase. In an embodiment, the nucleobase comprises adenine, thymine, cytosine, guanosine, or uracil, or a variant or modified form thereof.

[0004] In one aspect, the TREM entity (e.g., TREM) described herein comprises the sequence of Formula A: [L1]-[ASt Domain1]-[L2]-[DH Domain]-[L3]-[ACH Domain]-[VL Domain]-[TH Domain]-[L4]-[ASt Domain2] (A), wherein, independently, the TREM comprises an ASGPR binding moiety. In an embodiment, the ASGPR binding moiety comprises an ASGPR carbohydrate and an ASGPR linker. In an embodiment, the ASGPR binding moiety comprises a galactose (Gal) and/or N-acetylgalactosamine (GalNAc) moiety. In an embodiment, the ASGPR binding moiety comprises a plurality of Gal and/or GalNAc moieties (e.g., 2, 3, 4, 5, 6, 7, 8, or more Gal and/or GalNAc moieties). In an embodiment, the ASGPR binding moiety comprises a triantennary GalNAc moiety. In an embodiment, the TREM further comprises a chemical modification (e.g., a phosphothiorate internucleotide linkage, or a 2′-modification on a ribose moiety within the TREM).

[0005] In an embodiment, the ASGPR binding moiety is present on a sugar moiety (e.g., a ribose moiety) within the TREM. In an embodiment, the ASGPR binding moiety is present on a sugar moiety (e.g., a ribose moiety) at the 2′ position of the sugar moiety. In an embodiment, the ASGPR binding moiety is present on the sugar moiety (e.g., a ribose moiety) at the 2′ oxygen or carbon of the sugar moiety. In an embodiment, the ASGPR binding moiety is present on a sugar moiety (e.g., a ribose moiety) at the 4′ position of the sugar moiety. In an embodiment, the ASGPR binding moiety is present on the sugar moiety (e.g., a ribose moiety) at the 4′ carbon of the sugar moiety. In an embodiment, the ASGPR binding moiety is bound to the phosphate backbone at any nucleotide position within the TREM.

[0006] In an embodiment, the ASGPR binding moiety is present on a sugar moiety (e.g., ribose moiety) of a nucleotide within a TREM domain selected from L1, ASt Domain1, L2, DH Domain, L3, ACH Domain, VL Domain, TH Domain, L4, and ASt Domain2. In an embodiment, the ASGPR binding moiety is present on a sugar moiety (e.g., ribose moiety) of a nucleotide within the L1 region. In an embodiment, the ASGPR binding moiety is present on a sugar moiety (e.g., ribose moiety) of a nucleotide within the ASt Domain1. In an embodiment, the ASGPR binding moiety is present on a sugar moiety (e.g., ribose moiety) of a nucleotide within the L2 region. In an embodiment, the ASGPR binding moiety is present on a sugar moiety (e.g., ribose moiety) of a nucleotide within the DH Domain. In an embodiment, the ASGPR binding moiety is present on a sugar moiety (e.g., ribose moiety) of a nucleotide within the L3 region. In an embodiment, the ASGPR binding moiety is present on a sugar moiety (e.g., ribose moiety) of a nucleotide within the ACH Domain. In an embodiment, the ASGPR binding moiety is present on a sugar moiety (e.g., ribose moiety) of a nucleotide within the VL Domain. In an embodiment, the ASGPR binding moiety is present on a sugar moiety (e.g., ribose moiety) of a nucleotide within the TH Domain. In an embodiment, the ASGPR binding moiety is present on a sugar moiety (e.g., ribose moiety) of a nucleotide within the L4 region. In an embodiment, the ASGPR binding moiety is present on a sugar moiety (e.g., ribose moiety) of a nucleotide within the ASt Domain2.

[0007] In an embodiment, the ASGPR binding moiety is bound to the phosphate backbone at any nucleotide position within a TREM domain selected from L1, ASt Domain1, L2, DH Domain, L3, ACH Domain, VL Domain, TH Domain, L4, and ASt Domain2. In an embodiment, the ASGPR binding moiety is bound to the phosphate backbone at any nucleotide position within the L1 region. In an embodiment, the ASGPR binding moiety is bound to the phosphate backbone at any nucleotide position within the ASt Domain1. In an embodiment, the ASGPR binding moiety is bound to the phosphate backbone at any nucleotide position within the L2 region. In an embodiment, the ASGPR binding moiety is bound to the phosphate backbone at any nucleotide position within the DH Domain. In an embodiment, the ASGPR binding moiety is bound to the phosphate backbone at any nucleotide position within the LD3 region. In an embodiment, the ASGPR binding moiety is bound to the phosphate backbone at any nucleotide position within the ACH Domain. In an embodiment, the ASGPR binding moiety is bound to the phosphate backbone at any nucleotide position within the VL Domain. In an embodiment, the ASGPR binding moiety is bound to the phosphate backbone at any nucleotide position within the TH Domain. In an embodiment, the ASGPR binding moiety is bound to the phosphate backbone at any nucleotide position within the L4 region. In an embodiment, the ASGPR binding moiety is bound to the phosphate backbone at any nucleotide position within the ASt Domain2.

[0008] In an embodiment, the ASGPR binding moiety is present on a nucleobase within a nucleotide in the TREM. In an embodiment, the ASGPR binding moiety is present on the 5′ terminus of the TREM. In an embodiment, the ASGPR binding moiety is present on the 3′ terminus of the TREM.

[0009] In an embodiment, the ASGPR binding moiety is present in a TREM domain selected from L1, ASt Domain1, L2, DH Domain, L3, ACH Domain, VL Domain, TH Domain, L4, and ASt Domain2. In an embodiment, the ASGPR binding moiety is present in the L1 region. In an embodiment, the ASGPR binding moiety is present in the AST Domain1. In an embodiment, the ASGPR binding moiety is present in the L2 region. In an embodiment, the ASGPR binding moiety is present in the DH Domain. In an embodiment, the ASGPR binding moiety is present in the L3 region. In an embodiment, the ASGPR binding moiety is present in the ACH Domain. In an embodiment, the ASGPR binding moiety is present in the VL Domain. In an embodiment, the ASGPR binding moiety is present in the TH Domain. In an embodiment, the ASGPR binding moiety is present in the L4 region. In an embodiment, the ASGPR binding moiety is present in the AST Domain2.

[0010] In an embodiment, the ASGPR binding moiety is bound to an adenine nucleobase at a carbon atom or a nitrogen atom. In an embodiment, the ASGPR binding moiety is bound to an adenine at the C2 position, N9 position, or C8 position. In an embodiment, the ASGPR binding moiety is bound to the adenine at the C2 position. In an embodiment, the ASGPR binding moiety is bound to the adenine at the N9 position. In an embodiment, the ASGPR binding moiety is bound to the adenine at the C8 position. In an embodiment, the ASGPR binding moiety is bound to a substituent on the adenosine nucleobase, e.g., an amine on the adenine nucleobase (e.g., amine off the C6 position).

[0011] In an embodiment, the ASGPR binding moiety is bound to a guanine nucleobase at a carbon or nitrogen atom. In an embodiment, the ASGPR binding moiety is bound to the guanine at the N1, C2, N9, or C8 position. In an embodiment, the ASGPR binding moiety is bound to the guanine at the NI position. In an embodiment, the ASGPR binding moiety is bound to the guanine at the C2 position. In an embodiment, the ASGPR binding moiety is bound to the guanine at the N9 position. In an embodiment, the ASGPR binding moiety is bound to the guanine at the C8 position. In an embodiment, the ASGPR binding moiety is bound to a substituent on the guanosine nucleobase, e.g., an amine on the guanosine nucleobase (e.g., amine off the C2 position).

[0012] In an embodiment, the ASGPR binding moiety is bound to a cytosine nucleobase at a carbon atom. In an embodiment, the ASGPR binding moiety is bound to the cytosine at the C4, C5, or C6 position. In an embodiment, the ASGPR binding moiety is bound to the cytosine at the C4 position. In an embodiment, the ASGPR binding moiety is bound to the cytosine at the C5 position. In an embodiment, the ASGPR binding moiety is bound to the cytosine at the C6 position. In an embodiment, the ASGPR binding moiety is bound to a substituent on the cytosine nucleobase, e.g., an amine on the cytosine nucleobase (e.g., amine off the C4 position).

[0013] In an embodiment, the ASGPR binding moiety is bound to a uracil nucleobase at a carbon or nitrogen atom. In an embodiment, the ASGPR binding moiety is bound to the uracil at the N3, C5, or C6 position. In an embodiment, the ASGPR binding moiety is bound to the uracil at the N3 position. In an embodiment, the ASGPR binding moiety is bound to the uracil at the C5 position. In an embodiment, the ASGPR binding moiety is bound to the uracil at the C6 position.

[0014] In an embodiment, the ASGPR binding moiety is bound to a thymine nucleobase at a carbon or a nitrogen atom. In an embodiment, the ASGPR binding moiety is bound to the thymine at the N3, C5, or C6 position. In an embodiment, the ASGPR binding moiety is bound to the thymine at the N3 position. In an embodiment, the ASGPR binding moiety is bound to the thymine at the C5 position. In an embodiment, the ASGPR binding moiety is bound to the thymine at the C6 position. In an embodiment, the ASGPR binding moiety is bound to a substituent on the thymine nucleobase, e.g., a methyl on the thymine nucleobase (e.g., a methyl off the C5 position).

[0015] In an embodiment, the ASGPR binding moiety is bound to the terminal nucleotide of a TREM molecule. In an embodiment, the terminal nucleotide is an adenine, a guanine, a cytosine, thymine, a uracil, or a variant thereof. In an embodiment, the ASGPR binding moiety is bound to the 5′ and/or 3′ terminal nucleotide of the TREM molecule. In an embodiment, the ASGPR binding moiety is bound to the 5′ terminal nucleotide. In an embodiment, the ASGPR binding moiety is bound to the 3′ terminal nucleotide. In an embodiment, the ASGPR binding moiety is bound to the 5′ terminal nucleotide and the 3′ terminal nucleotide. In an embodiment, the ASGPR binding moiety is bound to the 5′ terminal nucleotide at the C5′ hydroxyl group of the sugar moiety (e.g., ribose moiety). In an embodiment, the ASGPR binding moiety is bound to the 3′ terminal nucleotide at the C3′ ribose position.

[0016] In an embodiment, the TREM comprising an ASGPR binding moiety retains the ability to support protein synthesis, be charged by a synthetase, be bound by an elongation factor, introduce an amino acid into a peptide chain, support elongation, and/or support initiation. In an embodiment, the TREM comprising an ASGPR binding moiety comprises at least X contiguous nucleotides without a chemical modification, wherein X is greater than 10. In an embodiment, the TREM comprising an ASGPR binding moiety comprises no more than 5, 10, or 15 nucleotides of a type (e.g., A, T, C, G or U) that do not comprise chemical modification, and is further modified at a TREM domain (e.g., L1, ASt Domain1, L2, DH Domain, L3, ACH Domain, VL Domain, TH Domain, L4, and/or ASt Domain2.). In an embodiment, the TREM comprising an ASGPR binding moiety comprises no more than 5, 10, or 15 nucleotides of a type (e.g., A, T, C, G or U) that do not comprise chemical modification. In an embodiment, the TREM comprising an ASGPR binding moiety comprises no more than 1, 2, 3, 4, 5, 6, 7, 8, 9, 10, 12, 14, 16, 18, 20, 22, 24, 26, 28, 30, 32, 34, 36, 38, 40, 42, 44, 46, 48, 50, 52, 54, 56, 58, 60, 62, 64, 66, 68, 70, 72, 74, 76, 78, or 80 nucleotides of a type (e.g., A, T, C, G or U) that do not comprise a chemical modification. In an embodiment, the TREM comprising an ASGPR binding moiety comprises at least X contiguous nucleotides comprising a chemical modification, wherein X is greater than 10. In an embodiment, the TREM comprising an ASGPR binding moiety comprises more than 5, 10, or 15 nucleotides of a type (e.g., A, T, C, G or U) that comprise a chemical modification, and is further modified at a TREM domain (e.g., L1, ASt Domain1, L2, DH Domain, L3, ACH Domain, VL Domain, TH Domain, L4, and ASt Domain2.). In an embodiment, the TREM comprising an ASGPR binding moiety comprises 1, 2, 3, 4, 5, 6, 7, 8, 9, 10, 12, 14, 16, 18, 20, 22, 24, 26, 28, 30, 32, 34, 36, 38, 40, 42, 44, 46, 48, 50, 52, 54, 56, 58, 60, 62, 64, 66, 68, 70, 72, 74, 76, 78, or 80 nucleotides of a type (e.g., A, T, C, G or U) that comprise a chemical modification. In an embodiment, the chemical modification is a naturally occurring chemical modification or a non-naturally occurring chemical modification (e.g., a phosphothiorate internucleotide linkage or a 2′-modification on a ribose moiety within the TREM). In an embodiment, the chemical modification comprises a fluorophore.

[0017] In another aspect, a TREM comprising an ASGPR binding moiety, or a composition thereof, described herein may be used to modulate a production parameter (e.g., an expression parameter and/or a signaling parameter) of an RNA corresponding to, or a polypeptide encoded by, a nucleic acid sequence comprising an endogenous open reading frame (ORF) having a premature termination codon (PTC).

[0018] In another aspect, a TREM comprising an ASGPR binding moiety, or a composition thereof, described herein may be used in a method of modulating a production parameter of an mRNA corresponding to, or polypeptide encoded by, an endogenous open reading frame (ORF) in a subject, which ORF comprises a premature termination codon (PTC), contacting the subject with a TREM comprising an ASGPR binding moiety or a composition thereof in an amount and/or for a time sufficient to modulate the production parameter of the mRNA or polypeptide, wherein the TREM comprising an ASGPR binding moiety has an anticodon that pairs with the codon having the first sequence, thereby modulating the production parameter in the subject. In an embodiment, the production parameter comprises a signaling parameter and/or an expression parameter, e.g., as described herein.

[0019] In another aspect, a TREM comprising an ASGPR binding moiety, or a composition thereof, described herein may be used in a method of treating a subject having an endogenous open reading frame (ORF) which comprises a premature termination codon (PTC), comprising providing a TREM comprising an ASGPR binding moiety, or a composition thereof, wherein the TREM comprising an ASGPR binding moiety comprises an anticodon that pairs with the PTC in the ORF; contacting the subject with the TREM comprising an ASGPR binding moiety or a composition thereof in an amount and/or for a time sufficient to treat the subject, thereby treating the subject. In an embodiment, the PTC comprises UAA, UGA or UAG.

[0020] In another aspect, a TREM comprising an ASGPR binding moiety, or a composition thereof, described herein may be used in a method of treating a subject having an disease or disorder associated with a premature termination codon (PTC), comprising providing a TREM comprising an ASGPR binding moiety or a composition described herein; contacting the subject with the TREM comprising an ASGPR binding moiety or a composition thereof in an amount and/or for a time sufficient to treat the subject, thereby treating the subject. In an embodiment, the PTC comprises UAA, UGA or UAG. In an embodiment, the disease or disorder associated with a PTC is a disease or disorder described herein, e.g., a cancer or a monogenic disease.

[0021] Additional features of any of the aforesaid TREM entities (e.g., TREMs, TREM core fragments, TREM Fragments, TREM compositions, preparations, methods of making TREM compositions and preparations, and methods of using TREM compositions and preparations include one or more of the following enumerated embodiments).

[0022] Those skilled in the art will recognize or be able to ascertain using no more than routine experimentation, many equivalents to the specific embodiments of the invention described herein, including in the Drawings, Description, Examples, and Claims.

### BRIEF DESCRIPTION OF DRAWINGS

[0023] FIG. 1 is a table listing exemplary TREMs. The sequences of each of these TREMs are provided in the table, wherein r: ribonucleotide and the modifications are annotated as follows, for example: m: 2′-OMe; *: PS linkage; f: 2′-fluoro; moe: 2′-moe; d: deoxyribonucleotide; 5MeC: 5-methylcytosine; Cy3: a exemplary fluorophore; 5-LC-N: a linker; GalNAc: triantennary GalNAc as described herein. Thus, for example, mA represents 2′-O-methyl adenosine, moe5MeC represents 2′-MOE nucleotide with 5-methylcytosine nucleobase, and dA represents an adenosine deoxyribonucleotide.

### DETAILED DESCRIPTION OF CERTAIN EMBODIMENTS

[0024] The present disclosure features tRNA-based effector molecule (TREM) entities (e.g., TREMs, TREM Core Fragments, and TREM Fragments) comprising an asialoglycoprotein receptor (ASGPR) binding moiety bound to a sugar, nucleobase, and/or to the phosphate backbone at any nucleotide position, including a terminus, as well as related methods of use thereof. As disclosed herein, TREM entities (e.g., TREMs) are complex molecules which can mediate a variety of cellular processes. Pharmaceutical TREM compositions, e.g., TREMs comprising an ASGPR binding moiety, can be administered to a cell, a tissue, or to a subject to modulate these functions.

### Definitions

[0025] An “acceptor stem domain (AStD),” as that term is used herein, refers to a domain that binds an amino acid. In an embodiment, an AStD comprises an ASt Domain1 and an ASt Domain2. For example, the ASt Domain 1 is at or near the 5′ end of the TREM and the ASt Domain2 is at or near the 3′ end of the TREM. An AStD comprises sufficient RNA sequence to mediate, e.g., when present in an otherwise wildtype tRNA, acceptance of an amino acid, e.g., its cognate amino acid or a non-cognate amino acid, and transfer of the amino acid (AA) in the initiation or elongation of a polypeptide chain. Typically, the AStD comprises a 3′-end adenosine (CCA) for acceptor stem charging which is part of synthetase recognition. In an embodiment the ASID has at least 75, 80, 85, 85, 90, 95, or 100% identity with a naturally occurring AStD, e.g., an AStD encoded by a nucleic acid in Table 1. In an embodiment, the TREM can comprise a fragment or analog of an AStD, e.g., an AStD encoded by a nucleic acid in Table 1, which fragment in embodiments that has AStD activity and in other embodiments do not have AStD activity. One of ordinary skill can determine the relevant corresponding sequence for any of the domains, stems, loops, or other sequence features mentioned herein from a sequence encoded by a nucleic acid in Table 1. For example, one of ordinary skill can determine the sequence which corresponds to an AStD from a tRNA sequence encoded by a nucleic acid in Table 1. In an embodiment, the ASGPR binding moiety is present within the AStD (e.g., is bound to a nucleotide, for example, to a sugar moiety, a nucleobase, the internucleotide region, and/or a terminus within the AStD). In an embodiment, the ASGPR binding moiety is bound to a sugar moiety (e.g., ribose moiety) of a nucleotide in the AStD. In an embodiment, the ASGPR binding moiety is present within the internucleotide linkage (e.g., the phosphate backbone) in the AStD. In an embodiment, the ASGPR binding moiety is bound to a nucleobase in the AStD. In an embodiment, the ASGPR binding moiety is present on a terminus (e.g., the 5′ or 3′ terminus) within the AStD.

[0026] In an embodiment, the ASt Domain1 comprises positions 1-9 within the TREM sequence. In an embodiment, the ASGPR binding moiety is present within the ASt Domain1 (e.g., positions 1-9) within the TREM sequence. In an embodiment, the ASGPR binding moiety is bound to a sugar moiety (e.g., ribose moiety) of a nucleotide at positions 1-9 within a TREM sequence. In an embodiment, the ASGPR binding moiety is present within the internucleotide linkage (e.g., the phosphate backbone) at positions 1-9 within a TREM sequence. In an embodiment, the ASGPR binding moiety is bound to a nucleobase within a nucleotide at positions 1-9 within the TREM sequence. In an embodiment, the ASGPR binding moiety is bound to the 5′ terminus of the ASt Domain1 (e.g., position 1 of the ASt Domain1).

[0027] In an embodiment, the ASt Domain2 comprises positions 65-76 within the TREM sequence. In an embodiment, the ASGPR binding moiety is present within ASt Domain2 (e.g., positions 65-76) within the TREM sequence. In an embodiment, the ASGPR binding moiety is bound to a sugar moiety (e.g., ribose moiety) of a nucleotide at positions 65-76 within a TREM sequence. In an embodiment, the ASGPR binding moiety is present within the internucleotide linkage (e.g., the phosphate backbone) at positions 65-76 within a TREM sequence. In an embodiment, the ASGPR binding moiety is bound to a nucleobase within a nucleotide at positions 65-76 within the TREM sequence. In an embodiment, the ASGPR binding moiety is bound to the 3′ terminus of the ASt Domain2 (e.g., position 76 of the ASt Domain2).

[0028] In an embodiment the AStD falls under the corresponding sequence of a consensus sequence provided in the “Consensus Sequence” section or differs from the consensus sequence by no more than 1, 2, 5, or 10 positions. In an embodiment, the ASGPR binding moiety is present within the AStD which falls under the corresponding sequence of a consensus sequence provided in the “Consensus Sequence” section or differs from the consensus sequence by no more than 1, 2, 5, or 10 positions.

[0029] In an embodiment, the AStD comprises residues R₁-R₂-R₃-R₄-R₅-R₆-R₇ (an exemplary ASt Domain1) and residues R₆₅-R₆₆-R₆₇-R₆₈-R₆₉-R₇₀-R₇₁ (an exemplary ASt Domain2) of Formula I _{ZZZ}, wherein ZZZ indicates any of the twenty amino acids. In some embodiments, Formula I _{ZZZ} refers to all species.

[0030] In an embodiment, the AStD comprises residues R₁-R₂-R₃-R₄-R₅-R₆-R₇ and residues R₆₅-R₆₆-R₆₇-R₆₈-R₆₉-R₇₀-R₇₁ of Formula II _{ZZZ}, wherein ZZZ indicates any of the twenty amino acids. In some embodiments, Formula II _{ZZZ} refers to mammals.

[0031] In an embodiment, the ASID comprises residues R₁-R₂-R₃-R₄-R₅-R₆-R₇ and residues R₆₅-R₆₆-R₆₇-R₆₈-R₆₉-R₇₀-R₇₁ of Formula III _{ZZZ}, wherein ZZZ indicates any of the twenty amino acids. In some embodiments, Formula III _{ZZZ} refers to humans.

[0032] In an embodiment, ZZZ indicates any of the amino acids: Alanine, Arginine, Asparagine, Aspartate, Cysteine, Glutamine, Glutamate, Glycine, Histidine, Isoleucine, Methionine, Leucine, Lysine, Phenylalanine, Proline, Serine, Threonine, Tryptophan, Tyrosine, or Valine.

[0033] An “anticodon hairpin domain (ACHD)”, as that term is used herein, refers to a domain comprising an anticodon that binds a respective codon in an mRNA, and comprises sufficient sequence, e.g., an anticodon triplet, to mediate, e.g., when present in an otherwise wildtype tRNA, pairing (with or without wobble) with a codon. In an embodiment the ACHD has at least 75, 80, 85, 85, 90, 95, or 100% identity with a naturally occurring ACHD, e.g., an ACHD encoded by a nucleic acid in Table 1. In an embodiment, the TREM can comprise a fragment or analog of an ACHD, e.g., an ACHD encoded by a nucleic acid in Table 1, which fragment in embodiments has ACHD activity and in other embodiments does not have ACHD activity. In an embodiment, the ASGPR binding moiety is present within the ACHD (e.g., is bound to a nucleotide, for example, to a sugar moiety, a nucleobase, and/or the internucleotide region within the ACHD). In an embodiment, the ASGPR binding moiety is bound to a sugar moiety (e.g., ribose moiety) of a nucleotide in the ACHD. In an embodiment, the ASGPR binding moiety is presenting within the internucleotide linkage (e.g., the phosphate backbone) in the ACHD. In an embodiment, the ASGPR binding moiety is bound to a nucleobase within a nucleotide in the ACHD.

[0034] In an embodiment, the ACHD comprises positions 27-43 within the TREM sequence. In an embodiment, the ASGPR binding moiety is present within the ACHD (e.g., positions 27-43) within the TREM sequence. In an embodiment, the ASGPR binding moiety is present within the ACHD (e.g., positions 27-43). In an embodiment, the ASGPR binding moiety is bound to a sugar moiety (e.g., ribose moiety) of a nucleotide at positions 27-43) within a TREM sequence. In an embodiment, the ASGPR binding moiety is present within the internucleotide linkage (e.g., the phosphate backbone) at positions 27-43 within a TREM sequence. In an embodiment, the ASGPR binding moiety is bound to a nucleobase within a nucleotide at positions 27-43 within the TREM sequence.

[0035] In an embodiment the ACHD falls under the corresponding sequence of a consensus sequence provided in the “Consensus Sequence” section or differs from the consensus sequence by no more than 1, 2, 5, or 10 positions. In an embodiment, the ASGPR binding moiety is present within the ACHD which falls under the corresponding sequence of a consensus sequence provided in the “Consensus sequence” section or a sequence that differs from the consensus sequence by no more than 1, 2, 5, or 10 positions.

[0036] In an embodiment, the ACHD comprises residues-R₃₀-R₃₁-R₃₂-R₃₃-R₃₄-R₃₅-R₃₆-R₃₇-R₃₈-R₃₉-R₄₀-R₄₁-R₄₂-R₄₃-R₄₄-R₄₅-R₄₆ of Formula I _{ZZZ}, wherein ZZZ indicates any of the twenty amino acids. In some embodiments, Formula I _{ZZZ} refers to all species.

[0037] In an embodiment, the ACHD comprises residues-R₃₀-R₃₁-R₃₂-R₃₃-R₃₄-R₃₅-R₃₆-R₃₇-R₃₈-R₃₉-R₄₀-R₄₁-R₄₂-R₄₃-R₄₄-R₄₅-R₄₆ of Formula II 777, wherein ZZZ indicates any of the twenty amino acids. In some embodiments, Formula II _{ZZZ} refers to mammals.

[0038] In an embodiment, the ACHD comprises residues-R₃₀-R₃₁-R₃₂-R₃₃-R₃₄-R₃₅-R₃₆-R₃₇-R₃₈-R₃₉-R₄₀-R₄₁-R₄₂-R₄₃-R₄₄-R₄₅-R₄₆ of Formula III _{ZZZ}, wherein ZZZ indicates any of the twenty amino acids. In some embodiments, Formula III _{ZZZ} refers to humans.

[0039] In an embodiment, ZZZ indicates any of the amino acids: Alanine, Arginine, Asparagine, Aspartate, Cysteine, Glutamine, Glutamate, Glycine, Histidine, Isoleucine, Methionine, Leucine, Lysine, Phenylalanine, Proline, Serine, Threonine, Tryptophan, Tyrosine, or Valine.

[0040] In an embodiment, the anticodon of a TREM entity comprises three nucleotide residues and pairs with a three nucleotide codon. In an embodiment, the anticodon of a TREM entity consists of three nucleotide residues and pairs with an anticodon which consists of three nucleotide residues. In an embodiment the anticodon of the TREM entity does not pair with a codon having four, five or a larger number of nucleotide residues but pairs only with three codon nucleotide residues.

[0041] In an embodiment, the TREM entity does not alter the reading frame of an mRNA. In an embodiment, the anti-codon of a TREM entity pairs with a triplet codon of an mRNA, and docs not pair with an adjacent nucleotide.

[0042] In an embodiment, use of the TREM entity does not alter the length of the polypeptide transcribed from the mRNA, e.g., it does not suppress a termination codon, e.g., a premature termination codon. In an embodiment, the TREM does not alter the length of the ORF of an mRNA.

[0043] An “asialoglycoprotein receptor (ASGPR) binding moiety,” as that term is used herein, refers to a moiety which binds an asialoglycoprotein receptor. In an embodiment, the ASGPR binding moiety as described herein refers to structure comprising: (i) an ASGPR carbohydrate and (ii) a ASGPR linker (e.g., a linker connecting the carbohydrate to the TREM). Exemplary ASGPR moieties include galactose (Gal), galactosamine (GalNH₂), or an N-acetylgalactosamine (GalNAc) moiety, for example, a Gal, GalNH₂, or GalNAc, or an analog thereof. The ASGPR binding moieties may comprise functional groups (e.g., hydroxyl groups, carboxylate groups, amines) that may be protected by a chemical protecting group, e.g., an acetyl group or methyl group. In an embodiment, the ASGPR binding moiety comprises a triantennary GalNAc moiety. ASGPR binding moieties are described in further detail herein.

[0044] A “cognate adaptor function TREM,” as that term is used herein, refers to a TREM which mediates initiation or elongation with the AA (the cognate AA) associated in nature with the anti-codon of the TREM.

[0045] “Decreased expression,” as that term is used herein, refers to a decrease in comparison to a reference, e.g., in the case where altered control region, or addition of an agent, results in a decreased expression of the subject product, it is decreased relative to an otherwise similar cell without the alteration or addition.

[0046] A dihydrouridine hairpin domain (DHD), as that term is used herein, refers to a domain which comprises sufficient RNA sequence to mediate, e.g., when present in an otherwise wildtype tRNA, recognition of aminoacyl-tRNA synthetase, e.g., acts as a recognition site for aminoacyl-tRNA synthetase for amino acid charging of the TREM. In embodiments, a DHD mediates the stabilization of the TREM's tertiary structure. In an embodiment the DHD has at least 75, 80, 85, 85, 90, 95, or 100% identity with a naturally occurring DHD, e.g., a DHD encoded by a nucleic acid in Table 1. In an embodiment, the TREM can comprise a fragment or analog of a DHD, e.g., a DHD encoded by a nucleic acid in Table 1, which fragment in embodiments has DHD activity and in other embodiments does not have DHD activity. In an embodiment, the ASGPR binding moiety is present within the DHD (e.g., is bound to a nucleotide, for example, to a sugar moiety, a nucleobase, and/or the internucleotide region within the DHD). In an embodiment, the ASGPR binding moiety is bound to a sugar moiety (e.g., ribose moiety) of a nucleotide in the DHD. In an embodiment, the ASGPR binding moiety is present within the internucleotide linkage (e.g., the phosphate backbone) in the DHD. In an embodiment, the ASGPR binding moiety is bound to a nucleobase within a nucleotide in the DHD.

[0047] In an embodiment, the DHD comprises positions 10-26 within the TREM sequence. In an embodiment, the ASGPR binding moiety is present within the DHD (e.g., positions 10-26) within the TREM sequence. In an embodiment, the ASGPR binding moiety is bound to a sugar moiety (e.g., ribose moiety) of a nucleotide at positions 10-26 within a TREM sequence. In an embodiment, the ASGPR binding moiety is present within the internucleotide linkage (e.g., the phosphate backbone) at positions 10-26 within a TREM sequence. In an embodiment, the ASGPR binding moiety is bound to a nucleobase within a nucleotide at positions 10-26 within the TREM sequence.

[0048] In an embodiment the DHD falls under the corresponding sequence of a consensus sequence provided in the “Consensus Sequence” section, or differs from the consensus sequence by no more than 1, 2, 5, or 10 positions. In an embodiment, the ASGPR binding moiety is present within the DHD which falls under the corresponding sequence of a consensus sequence provided in the “Consensus Sequence” section or a sequence that differs from the consensus sequence by no more than 1, 2, 5, or 10 positions.

[0049] In an embodiment, the DHD comprises residues R₁₀-R₁₁-R₁₂-R₁₃-R₁₄ R₁₅-R₁₆-R₁₇-R₁₈-R₁₉-R₂₀-R₂₁-R₂₂-R₂₃-R₂₄-R₂₅-R₂₆-R₂₇-R₂₈ of Formula I _{ZZZ}, wherein ZZZ indicates any of the twenty amino acids. In some embodiments, Formula I _{ZZZ} refers to all species.

[0050] In an embodiment, the DHD comprises residues R₁₀-R₁₁-R₁₂-R₁₃-R₁₄ R₁₅-R₁₆-R₁₇-R₁₈-R₁₉-R₂₀-R₂₁-R₂₂-R₂₃-R₂₄-R₂₅-R₂₆-R₂₇-R₂₈ of Formula II _{ZZZ}, wherein ZZZ indicates any of the twenty amino acids. In some embodiments, Formula II _{ZZZ} refers to mammals.

[0051] In an embodiment, the DHD comprises residues R₁₀-R₁₁-R₁₂-R₁₃-R₁₄ R₁₅-R₁₆-R₁₇-R₁₈-R₁₉-R₂₀-R₂₁-R₂₂-R₂₃-R₂₄-R₂₅-R₂₆-R₂₇-R₂₈ of Formula III _{ZZZ}, wherein ZZZ indicates any of the twenty amino acids. In some embodiments, Formula III _{ZZZ} refers to humans.

[0052] In an embodiment, ZZZ indicates any of the amino acids: Alanine, Arginine, Asparagine, Aspartate, Cysteine, Glutamine, Glutamate, Glycine, Histidine, Isoleucine, Methionine, Leucine, Lysine, Phenylalanine, Proline, Serine, Threonine, Tryptophan, Tyrosine, or Valine.

[0053] An “exogenous nucleic acid,” as that term is used herein, refers to a nucleic acid sequence that is not present in or differs by at least one nucleotide from the closest sequence in a reference cell, e.g., a cell into which the exogenous nucleic acid is introduced. In an embodiment, an exogenous nucleic acid comprises a nucleic acid that encodes a TREM.

[0054] An “exogenous TREM,” as that term is used herein, refers to a TREM that:
[0055] (a) differs by at least one nucleotide or one post transcriptional modification from the closest sequence tRNA in a reference cell, e.g., a cell into which the exogenous nucleic acid is introduced;
[0056] (b) has been introduced into a cell other than the cell in which it was transcribed;
[0057] (c) is present in a cell other than one in which it naturally occurs; or
[0058] (d) has an expression profile, e.g., level or distribution, that is non-wildtype, e.g., it is expressed at a higher level than wildtype. In an embodiment, the expression profile can be mediated by a change introduced into a nucleic acid that modulates expression or by addition of an agent that modulates expression of the RNA molecule. In an embodiment an exogenous TREM comprises 1, 2, 3 or 4 of properties (a)-(d).

[0059] A “GMP-grade composition,” as that term is used herein, refers to a composition in compliance with current good manufacturing practice (cGMP) guidelines, or other similar requirements. In an embodiment, a GMP-grade composition can be used as a pharmaceutical product.

[0060] As used herein, the terms “increasing” and “decreasing” refer to modulating that results in, respectively, greater or lesser amounts of function, expression, or activity of a particular metric relative to a reference. For example, subsequent to administration to a cell, tissue or subject of a TREM described herein, the amount of a marker of a metric (e.g., protein translation, mRNA stability, protein folding) as described herein may be increased or decreased by at least 5%, 10%, 15%, 20%, 25%, 30%, 35%, 40%, 45%, 50%, 55%, 60%, 65%, 70%, 75%, 80%, 85%, 90%, 95% or 98%, 2×, 3×, 5×, 10× or more relative to the amount of the marker prior to administration or relative to the effect of a negative control agent. The metric may be measured subsequent to administration at a time that the administration has had the recited effect, e.g., at least 12 hours, 24 hours, one week, one month, 3 months, or 6 months, after a treatment has begun.

[0061] “Increased expression,” as that term is used herein, refers to an increase in comparison to a reference, e.g., in the case where altered control region, or addition of an agent, results in an increased expression of the subject product, it is increased relative to an otherwise similar cell without the alteration or addition.

[0062] A Linker 2 region (L2), as that term is used herein, refers to a linker comprising residues R₈-R₉ of a consensus sequence provided in the “Consensus Sequence” section.

[0063] A Linker 3 region (L3), that term is used herein, refers to a linker comprising residue R₂₉ of a consensus sequence provided in the “Consensus Sequence” section.

[0064] A “Linker 4 region (L4), as that term is used herein, refers to a domain comprising residue R₇₂ of a consensus sequence provided in the “Consensus Sequence” section.

[0065] A “modification,” as that term is used herein with reference to a nucleotide, refers to a modification of the chemical structure, e.g., a covalent modification, of the subject nucleotide. The modification can be naturally occurring or non-naturally occurring. In an embodiment, the modification is present within the nucleobase, nucleotide sugar, or internucleotide linkage of a nucleotide of the TREM. In an embodiment, the modification is non-naturally occurring. In an embodiment, the modification is naturally occurring. In an embodiment, the modification is a synthetic modification. In an embodiment, the modification is a modification provided in Table 5.

[0066] A “naturally occurring nucleotide,” as that term is used herein, refers to a nucleotide that does not comprise a non-naturally occurring modification. In an embodiment, it includes a naturally occurring modification.

[0067] A “nucleotide,” as that term is used herein, refers to an entity comprising a sugar, typically a pentameric sugar; a nucleobase; and a phosphate linking group (e.g., internucleotide linkage). In an embodiment, a nucleotide comprises a naturally occurring, e.g., naturally occurring in a human cell, nucleotide, e.g., an adenine, thymine, guanine, cytosine, or uracil nucleotide.

[0068] A “thymine hairpin domain (THD), as that term is used herein, refers to a domain which comprises sufficient RNA sequence, to mediate, e.g., when present in an otherwise wildtype tRNA, recognition of the ribosome, e.g., acts as a recognition site for the ribosome to form a TREM-ribosome complex during translation. In an embodiment the THD has at least 75, 80, 85, 85, 90, 95, or 100% identity with a naturally occurring THD, e.g., a THD encoded by a nucleic acid in Table 1. In an embodiment, the TREM can comprise a fragment or analog of a THD, e.g., a THD encoded by a nucleic acid in Table 1, which fragment in embodiments has THD activity and in other embodiments does not have THD activity. In an embodiment, the ASGPR binding moiety is present within the THD (e.g., is bound to a nucleotide, for example, to a sugar moiety, a nucleobase, and/or the internucleotide region within the THD). In an embodiment, the ASGPR binding moiety is bound to a sugar moiety (e.g., ribose moiety) of a nucleotide in the THD. In an embodiment, the ASGPR binding moiety is present within the internucleotide linkage (e.g., the phosphate backbone) in the THD. In an embodiment, the ASGPR binding moiety is bound to a nucleobase within a nucleotide in the THD.

[0069] In an embodiment, the THD comprises positions 50-64 within the TREM sequence. In an embodiment, the ASGPR binding moiety is present within the THD (e.g., positions 50-64) within the TREM sequence. In an embodiment, the ASGPR binding moiety is bound to a sugar moiety (e.g., ribose moiety) of a nucleotide at positions 50-64 within a TREM sequence. In an embodiment, the ASGPR binding moiety is present within the internucleotide linkage (e.g., the phosphate backbone) at positions 50-64 within a TREM sequence. In an embodiment, the ASGPR binding moiety is bound to a nucleobase within a nucleotide at positions 50-64 within the TREM sequence.

[0070] In an embodiment the THD falls under the corresponding sequence of a consensus sequence provided in the “Consensus Sequence” section, or differs from the consensus sequence by no more than 1, 2, 5, or 10 positions. In an embodiment, the ASGPR binding moiety is present within the THD which falls under the corresponding sequence of a consensus sequence provided in the “Consensus Sequence” section or a sequence that differs from the consensus sequence by no more than 1, 2, 5, or 10 positions.

[0071] In an embodiment, the THD comprises residues -R₄₈-R₄₉-R₅₀-R₅₁-R₅₂-R₅₃-R₅₄-R₅₅-R₅₆-R₅₇-R₅₈-R₅₉-R₆₀-R₆₁-R₆₂-R₆₃-R₆₄ of Formula I _{ZZZ}, wherein ZZZ indicates any of the twenty amino acids. In some embodiments, Formula I _{ZZZ} refers to all species.

[0072] In an embodiment, the THD comprises residues-R₄₈-R₄₉-R₅₀-R₅₁-R₅₂-R₅₃-R₅₄-R₅₅-R₅₆-R₅₇-R₅₈-R₅₉-R₆₀-R₆₁-R₆₂-R₆₃-R₆₄ of Formula II _{ZZZ}, wherein ZZZ indicates any of the twenty amino acids. In some embodiments, Formula II _{ZZZ} refers to mammals.

[0073] In an embodiment, the THD comprises residues-R₄₈-R₄₉-R₅₀-R₅₁-R₅₂-R₅₃-R₅₄-R₅₅-R₅₆-R₅₇-R₅₈-R₅₉-R₆₀-R₆₁-R₆₂-R₆₃-R₆₄ of Formula II _{ZZZ}, wherein ZZZ indicates any of the twenty amino acids. In some embodiments, Formula III _{ZZZ} refers to humans.

[0074] In an embodiment, ZZZ indicates any of the amino acids: Alanine, Arginine, Asparagine, Aspartate, Cysteine, Glutamine, Glutamate, Glycine, Histidine, Isoleucine, Methionine, Leucine, Lysine, Phenylalanine, Proline, Serine, Threonine, Tryptophan, Tyrosine, or Valine.

[0075] A “tRNA-based effector molecule” or “TREM,” as that term is used herein, refers to an RNA molecule comprising a structure or property from (a)-(v) below, and which is a recombinant TREM, a synthetic TREM, or a TREM expressed from a heterologous cell. The TREMs described in the present invention are synthetic molecules and are made, e.g., in a cell free reaction, e.g., in a solid state or liquid phase synthetic reaction. TREMs are chemically distinct, e.g., in terms of primary sequence, type or location of modifications from the endogenous tRNA molecules made in cells, e.g., in mammalian cells, e.g., in human cells. A TREM can have a plurality (e.g., 2, 3, 4, 5, 6, 7, 8, 9) of the structures and functions of (a)-(v).

[0076] In an embodiment, a TREM is non-native, as evaluated by structure or the way in which it was made.

[0077] In an embodiment, a TREM comprises one or more of the following structures or properties:
[0078] (a′) an optional linker region of a consensus sequence provided in the “Consensus Sequence” section, e.g., a Linker 1 region;
[0079] (a) an acceptor stem domain (an AStD), which typically comprises an ASt Domain1 and an ASt Domain2.
[0080] (a′-1) a Linker 2 region (L2) a linker comprising residues R₈-R₉ of a consensus sequence provided in the “Consensus Sequence” section, e.g., a Linker 2 region;
[0081] (b) a DHD or dihydrouridine hairpin domain (DHD);
[0082] (b′-1) a Linker 3 region, or L3;
[0083] (c) an ACHD or anticodon hairpin domain;
[0084] (d) a VLD, or variable loop domain (VLD);
[0085] (e) a THD or thymine hairpin domain (THD);
[0086] (c′1) an L4 linker comprising residue R₇₂ of a consensus sequence provided in the “Consensus Sequence” section;
[0087] (f) under physiological conditions, it comprises a stem structure and one or a plurality of loop structures, e.g., 1, 2, or 3 loops. A loop can comprise a domain described herein, e.g., a domain selected from (a)-(e). A loop can comprise one or a plurality of domains. In an embodiment, a stem or loop structure has at least 75, 80, 85, 85, 90, 95, or 100% identity with a naturally occurring stem or loop structure, e.g., a stem or loop structure encoded by a nucleic acid in Table 1. In an embodiment, the TREM can comprise a fragment or analog of a stem or loop structure, e.g., a stem or loop structure encoded by a nucleic acid in Table 1, which fragment in embodiments has activity of a stem or loop structure, and in other embodiments does not have activity of a stem or loop structure;
[0088] (g) a tertiary structure, e.g., an L-shaped tertiary structure;
[0089] (h) adaptor function, i.e., the TREM mediates acceptance of an amino acid, e.g., its cognate amino acid and transfer of the AA in the initiation or elongation of a polypeptide chain;
[0090] (i) cognate adaptor function wherein the TREM mediates acceptance and incorporation of an amino acid (e.g., cognate amino acid) associated in nature with the anti-codon of the TREM to initiate or elongate a polypeptide chain;
[0091] (j) non-cognate adaptor function, wherein the TREM mediates acceptance and incorporation of an amino acid (e.g., non-cognate amino acid) other than the amino acid associated in nature with the anti-codon of the TREM in the initiation or elongation of a polypeptide chain;
[0092] (k) a regulatory function, e.g., an epigenetic function (e.g., gene silencing function or signaling pathway modulation function), cell fate modulation function, mRNA stability modulation function, protein stability modulation function, protein transduction modulation function, or protein compartmentalization function;
[0093] (l) a structure which allows for ribosome binding;
[0094] (m) a post-transcriptional modification, e.g., a naturally occurring post-transcriptional modification;
[0095] (n) the ability to inhibit a functional property of a tRNA, e.g., any of properties (h)-(k) possessed by a tRNA;
[0096] (o) the ability to modulate cell fate;
[0097] (p) the ability to modulate ribosome occupancy;
[0098] (q) the ability to modulate protein translation;
[0099] (r) the ability to modulate mRNA stability;
[0100] (s) the ability to modulate protein folding and structure;
[0101] (t) the ability to modulate protein transduction or compartmentalization;
[0102] (u) the ability to modulate protein stability; or
[0103] (v) the ability to modulate a signaling pathway, e.g., a cellular signaling pathway.

[0104] In an embodiment, a TREM comprises a full-length tRNA molecule or a fragment thereof.

[0105] In an embodiment, a TREM comprises the following properties: (a)-(e).

[0106] In an embodiment, a TREM comprises the following properties: (a) and (c).

[0107] In an embodiment, a TREM comprises the following properties: (a), (c) and (h).

[0108] In an embodiment, a TREM comprises the following properties: (a), (c), (h) and (b).

[0109] In an embodiment, a TREM comprises the following properties: (a), (c), (h) and (e).

[0110] In an embodiment, a TREM comprises the following properties: (a), (c), (h), (b) and (e).

[0111] In an embodiment, a TREM comprises the following properties: (a), (c), (h), (b), (e) and (g).

[0112] In an embodiment, a TREM comprises the following properties: (a), (c), (h) and (m).

[0113] In an embodiment, a TREM comprises the following properties: (a), (c), (h), (m), and (g).

[0114] In an embodiment, a TREM comprises the following properties: (a), (c), (h), (m) and (b).

[0115] In an embodiment, a TREM comprises the following properties: (a), (c), (h), (m) and (e).

[0116] In an embodiment, a TREM comprises the following properties: (a), (c), (h), (m), (g), (b) and (e).

[0117] In an embodiment, a TREM comprises the following properties: (a), (c), (h), (m), (g), (b), (e) and (q).

[0118] In an embodiment, a TREM comprises:
[0119] (i) an amino acid attachment domain that binds an amino acid (e.g., an AStD, as described in (a) herein; and
[0120] (ii) an anticodon that binds a respective codon in an mRNA (e.g., an ACHD, as described in (c) herein).

[0121] In an embodiment the TREM comprises a flexible RNA linker which provides for covalent linkage of (i) to (ii).

[0122] In an embodiment, the TREM mediates protein translation.

[0123] In an embodiment a TREM comprises a linker, e.g., an RNA linker, e.g., a flexible RNA linker, which provides for covalent linkage between a first and a second structure or domain. In an embodiment, an RNA linker comprises at least 1, 2, 3, 4, 5, 6, 7, 8, 9, 10, 11, 12, 13, 14 or 15 ribonucleotides. A TREM can comprise one or a plurality of linkers, e.g., in embodiments a TREM comprising (a), (b), (c), (d) and (e) can have a first linker between a first and second domain, and a second linker between a third domain and another domain.

[0124] In an embodiment, the TREM comprises a sequence of Formula A: [L1]-[ASt Domain1]-[L2]-[DH Domain]-[L3]-[ACH Domain]-[VL Domain]-[TH Domain]-[L4]-[ASt Domain2].

[0125] In an embodiment, a TREM comprises an RNA sequence at least 60, 65, 70, 75, 80, 85, 90, 95, 96, 97, 98 or 99% identical with, or which differs by no more than 1, 2, 3, 4, 5, 10, 15, 20, 25, or 30 ribonucleotides from, an RNA sequence encoded by a DNA sequence listed in Table 1, or a fragment or functional fragment thereof. In an embodiment, a TREM comprises an RNA sequence encoded by a DNA sequence listed in Table 1, or a fragment or functional fragment thereof. In an embodiment, a TREM comprises an RNA sequence encoded by a DNA sequence at least 60, 65, 70, 75, 80, 85, 90, 95, 96, 97, 98 or 99% identical with a DNA sequence listed in Table 1, or a fragment or functional fragment thereof. In an embodiment, a TREM comprises a TREM domain, e.g., a domain described herein, comprising at least 60, 65, 70, 75, 80, 85, 90, 95, 96, 97, 98, or 99% identical with, or which differs by no more than 1, 2, 3, 4, 5, 10, or 15, ribonucleotides from, an RNA encoded by a DNA sequence listed in Table 1, or a fragment or a functional fragment thereof. In an embodiment, a TREM comprises a TREM domain, e.g., a domain described herein, comprising an RNA sequence encoded by DNA sequence listed in Table 1, or a fragment or functional fragment thereof. In an embodiment, a TREM comprises a TREM domain, e.g., a domain described herein, comprising an RNA sequence encoded by DNA sequence at least 60, 65, 70, 75, 80, 85, 90, 95, 96, 97, 98 or 99% identical with a DNA sequence listed in Table 1, or a fragment or functional fragment thereof.

[0126] In an embodiment, a TREM is 76-90 nucleotides in length. In embodiments, a TREM or a fragment or functional fragment thereof is between 10-90 nucleotides, between 10-80 nucleotides, between 10-70 nucleotides, between 10-60 nucleotides, between 10-50 nucleotides, between 10-40 nucleotides, between 10-30 nucleotides, between 10-20 nucleotides, between 20-90 nucleotides, between 20-80 nucleotides, 20-70 nucleotides, between 20-60 nucleotides, between 20-50 nucleotides, between 20-40 nucleotides, between 30-90 nucleotides, between 30-80 nucleotides, between 30-70 nucleotides, between 30-60 nucleotides, or between 30-50 nucleotides.

[0127] In an embodiment, a TREM is aminoacylated, e.g., charged, with an amino acid by an aminoacyl tRNA synthetase.

[0128] In an embodiment, a TREM is not charged with an amino acid, e.g., an uncharged TREM (uTREM).

[0129] In an embodiment, a TREM comprises less than a full length tRNA. In embodiments, a TREM can correspond to a naturally occurring fragment of a tRNA, or to a non-naturally occurring fragment. Exemplary fragments include: TREM halves (e.g., from a cleavage in the ACHD, e.g., in the anticodon sequence, e.g., 5′halves or 3′ halves); a 5′ fragment (e.g., a fragment comprising the 5′ end, e.g., from a cleavage in a DHD or the ACHD); a 3′ fragment (e.g., a fragment comprising the 3′ end, e.g., from a cleavage in the THD); or an internal fragment (e.g., from a cleavage in one or more of the ACHD, DHD or THD).

[0130] A “TREM core fragment,” as that term is used herein, refers to a portion of the sequence of Formula B: [L1]_{y}-[ASt Domain1]ₓ-[L2]_{y}-[DH Domain]_{y}-[L3]_{y}-[ACH Domain]ₓ-[VL Domain] y-[TH Domain] y-[L4] y-[ASt Domain2]ₓ, wherein: x=1 and y=0 or 1.

[0131] A “TREM fragment,” as used herein, refers to a portion of a TREM, wherein the TREM comprises a sequence of Formula A: [L1]-[ASt Domain1]-[L2]-[DH Domain]-[L3]-[ACH Domain]-[VL Domain]-[TH Domain]-[L4]-[ASt Domain2].

[0132] A “non-cognate adaptor function TREM,” as that term is used herein, refers to a TREM which mediates initiation or elongation with an AA (a non-cognate AA) other than the AA associated in nature with the anti-codon of the TREM. In an embodiment, a non-cognate adaptor function TREM is also referred to as a mischarged TREM (mTREM).

[0133] A “non-naturally occurring sequence,” as that term is used herein, refers to a sequence wherein an Adenine is replaced by a residue other than an analog of adenine, a cytosine is replaced by a residue other than an analog of cytosine, a guanine is replaced by a residue other than an analog of guanine, and a uracil is replaced by a residue other than an analog of uracil. An analog refers to any possible derivative of the ribonucleotides, A, G, C or U. In an embodiment, a sequence having a derivative of any one of ribonucleotides A, G, C or U is a non-naturally occurring sequence.

[0134] A “pharmaceutical TREM composition,” as that term is used herein, refers to a TREM composition that is suitable for pharmaceutical use. Typically, a pharmaceutical TREM composition comprises a pharmaceutical excipient. In an embodiment the TREM will be the only active ingredient in the pharmaceutical TREM composition. In embodiments the pharmaceutical TREM composition is free, substantially free, or has less than a pharmaceutically acceptable amount, of host cell proteins, DNA, e.g., host cell DNA, endotoxins, and bacteria.

[0135] A “post-transcriptional processing,” as that term is used herein, with respect to a subject molecule, e.g., a TREM, RNA or tRNAs, refers to a covalent modification of the subject molecule. In an embodiment, the covalent modification occurs post-transcriptionally. In an embodiment, the covalent modification occurs co-transcriptionally. In an embodiment the modification is made in vivo, e.g., in a cell used to produce a TREM. In an embodiment the modification is made ex vivo, e.g., it is made on a TREM isolated or obtained from the cell which produced the TREM. In an embodiment, the post-transcriptional modification is selected from a post-transcriptional modification listed in Table 2.

[0136] A “subject,” as this term is used herein, includes any organism, such as a human or other animal. In embodiments, the subject is a vertebrate animal (e.g., mammal, bird, fish, reptile, or amphibian). In embodiments, the subject is a mammal, e.g., a human. In embodiments, the method subject is a non-human mammal. In embodiments, the subject is a non-human mammal such as a non-human primate (e.g., monkeys, apes), ungulate (e.g., cattle, buffalo, sheep, goat, pig, camel, llama, alpaca, deer, horses, donkeys), carnivore (e.g., dog, cat), rodent (e.g., rat, mouse), or lagomorph (e.g., rabbit). In embodiments, the subject is a bird, such as a member of the avian taxa Galliformes (e.g., chickens, turkeys, pheasants, quail), Anseriformes (e.g., ducks, geese), Paleaognathae (e.g., ostriches, emus), Columbiformes (e.g., pigeons, doves), or Psittaciformes (e.g., parrots). The subject may be a male or female of any age group, e.g., a pediatric subject (e.g., infant, child, adolescent) or adult subject (e.g., young adult, middle-aged adult, or senior adult)). A non-human subject may be a transgenic animal.

[0137] A “synthetic TREM,” as that term is used herein, refers to a TREM which was synthesized other than in or by a cell having an endogenous nucleic acid encoding the TREM, e.g., a synthetic TREM is synthetized by cell-free solid phase synthesis. A synthetic TREM can have the same, or a different, sequence, or tertiary structure, as a native tRNA.

[0138] A “recombinant TREM,” as that term is used herein, refers to a TREM that was expressed in a cell modified by human intervention, having a modification that mediates the production of the TREM, e.g., the cell comprises an exogenous sequence encoding the TREM, or a modification that mediates expression, e.g., transcriptional expression or post-transcriptional modification, of the TREM. A recombinant TREM can have the same, or a different, sequence, set of post-transcriptional modifications, or tertiary structure, as a reference tRNA, e.g., a native tRNA.

[0139] A “tRNA”, as that term is used herein, refers to a naturally occurring transfer ribonucleic acid in its native state.

[0140] A “TREM composition,” as that term is used herein, refers to a composition comprising a plurality of TREMs, a plurality of TREM core fragments and/or a plurality of TREM fragments. A TREM composition can comprise one or more species of TREMs, TREM core fragments or TREM fragments. In an embodiment, the composition comprises only a single species of TREM, TREM core fragment or TREM fragment. In an embodiment, the TREM composition comprises a first TREM, TREM core fragment or TREM fragment species; and a second TREM, TREM core fragment or TREM fragment species. In an embodiment, the TREM composition comprises X TREM, TREM core fragment or TREM fragment species, wherein X=2, 3, 4, 5, 6, 7, 8, 9, or 10. In an embodiment, the TREM, TREM core fragment or TREM fragment has at least 70, 75, 80, 85, 90, or 95, or has 100%, identity with a sequence encoded by a nucleic acid in Table 1. A TREM composition can comprise one or more species of TREMs, TREM core fragments or TREM fragments. In an embodiment, the TREM composition is at least 10, 20, 30, 40, 50, 60, 70, 80, 90, 95 or 99% dry weight TREMs (for a liquid composition dry weight refers to the weight after removal of substantially all liquid, e.g., after lyophilization). In an embodiment, the composition is a liquid. In an embodiment, the composition is dry, e.g., a lyophilized material. In an embodiment, the composition is a frozen composition. In an embodiment, the composition is sterile. In an embodiment, the composition comprises at least 0.5 g, 1.0 g, 5.0 g, 10 g, 15 g, 25 g, 50 g, 100 g, 200 g, 400 g, or 500 g (e.g., as determined by dry weight) of TREM.

[0141] In an embodiment, at least X % of the TREMs in a TREM composition comprises a chemical modification at a selected position, and X is 80, 90, 95, 96, 97, 98, 99, or 99.5.

[0142] In an embodiment, at least X % of the TREMs in a TREM composition comprises a chemical modification at a first position and a chemical modification at a second position, and X, independently, is 80, 90, 95, 96, 97, 98, 99, or 99.5. In embodiments, the modification at the first and second position is the same. In embodiments, the modification at the first and second position are different. In embodiments, the nucleotide at the first and second position is the same, e.g., both are adenine. In embodiments, the nucleotide at the first and second position are different, e.g., one is adenine and one is thymine.

[0143] In an embodiment, at least X % of the TREMs in a TREM composition comprises a chemical modification at a first position and less than Y % have a chemical modification at a second position, wherein X is 80, 90, 95, 96, 97, 98, 99, or 99.5 and Y is 20, 20, 5, 2, 1, 0.1, or 0.01. In embodiments, the nucleotide at the first and second position is the same, e.g., both are adenine. In embodiments the nucleotide at the first and second position are different, e.g., one is adenine and one is thymine.

[0144] A “variable loop domain (VLD),” as that term is used herein refers to a domain which comprises sufficient RNA sequence to mediate, e.g., when present in an otherwise wildtype tRNA, recognition of aminoacyl-tRNA synthetase, e.g., acts as a recognition site for aminoacyl-tRNA synthetase for amino acid charging of the TREM. In embodiments, a VLD mediates the stabilization of the TREM's tertiary structure. In an embodiment, a VLD modulates, e.g., increases, the specificity of the TREM, e.g., for its cognate amino acid, e.g., the VLD modulates the TREM's cognate adaptor function. In an embodiment the VLD has at least 75, 80, 85, 85, 90, 95, or 100% identity with a naturally occurring VLD, e.g., a VLD encoded by a nucleic acid in Table 1. In an embodiment, the TREM can comprise a fragment or analog of a VLD, e.g., a VLD encoded by a nucleic acid in Table 1, which fragment in embodiments has VLD activity and in other embodiments does not have VLD activity. In an embodiment, the ASGPR binding moiety is present within the VLD (e.g., is bound to a nucleotide, for example, to a sugar moiety, a nucleobase, and/or the internucleotide region within the VLD). In an embodiment, the ASGPR binding moiety is bound to a sugar moiety (e.g., ribose moiety) of a nucleotide in the VLD. In an embodiment, the ASGPR binding moiety is presenting within the internucleotide linkage (e.g., the phosphate backbone) in the VLD. In an embodiment, the ASGPR binding moiety is bound to a nucleobase within a nucleotide in the VLD.

[0145] In an embodiment, the VLD comprises positions 44-49 within the TREM sequence. In an embodiment, the ASGPR binding moiety is present within the VLD (e.g., positions 44-49) within the TREM sequence. In an embodiment, the ASGPR binding moiety is bound to a sugar moiety (e.g., ribose moiety) of a nucleotide at positions 44-49 within a TREM sequence. In an embodiment, the ASGPR binding moiety is present within the internucleotide linkage (e.g., the phosphate backbone) at positions 44-49 within a TREM sequence. In an embodiment, the ASGPR binding moiety is bound to a nucleobase within a nucleotide at positions 44-49 within the TREM sequence.

[0146] In an embodiment the VLD falls under the corresponding sequence of a consensus sequence provided in the “Consensus Sequence” section. In an embodiment, the ASGPR binding moiety is present within the VLD which falls under the corresponding sequence of a consensus sequence provided in the “Consensus Sequence” section or differs from the consensus sequence by no more than 1, 2, 5, or 10 positions.

[0147] In an embodiment, the VLD comprises residue -[R₄₇]ₓ of a consensus sequence provided in the “Consensus Sequence” section, wherein x=1-271 (e.g., x=1-250, x=1-225, x=1-200, x=1-175, x=1-150, x=1-125, x=1-100, x=1-75, x=1-50, x=1-40, x=1-30, x=1-29, x=1-28, x=1-27, x=1-26, x=1-25, x=1-24, x=1-23, x=1-22, x=1-21, x=1-20, x=1-19, x=1-18, x=1-17, x=1-16, x=1-15, x=1-14, x=1-13, x=1-12, x=1-11, x=1-10, x=10-271, x=20-271, x=30-271, x=40-271, x=50-271, x=60-271, x=70-271, x=80-271, x=100-271, x=125-271, x=150-271, x=175-271, x=200-271, x=225-271, x=1, x=2, x=3, x=4, x=5, x=6, x=7, x=8, x=9, x=10, x=11, x=12, x=13, x=14, x=15, x=16, x=17, x=18, x=19, x=20, x=21, x=22, x=23, x=24, x=25, x=26, x=27, x=28, x=29, x=30, x=40, x=50, x=60, x=70, x=80, x=90, x=100, x=110, x=125, x=150, x=175, x=200, x=225, x=250, or x=271).

### TREM Entities

[0148] Described herein are TREM entities, e.g., a TREM, a TREM Core Fragment, or a TREM Fragment, modified with an asialoglycoprotein receptor (ASGPR) binding moiety, as well as compositions and methods of use thereof. A TREM entity (e.g., a TREM) refers to an RNA molecule comprising one or more of the properties described herein. A TREM entity (e.g., a TREM) can comprise a chemical modification, e.g., as provided in Table 5.

[0149] In an embodiment, the ASGPR binding moiety is bound to an adenine nucleobase at a carbon atom or a nitrogen atom. In an embodiment, the ASGPR binding moiety is bound to an adenine at the C2 position, N9 position, or C8 position. In an embodiment, the ASGPR binding moiety is bound to the adenine at the C2 position. In an embodiment, the ASGPR binding moiety is bound to the adenine at the N9 position. In an embodiment, the ASGPR binding moiety is bound to the adenine at the C8 position. In an embodiment, the ASGPR binding moiety is bound to a substituent on the adenosine nucleobase, e.g., an amine on the adenine nucleobase (e.g., amine off the C6 position).

[0150] In an embodiment, the ASGPR binding moiety is bound to a guanine nucleobase at a carbon or nitrogen atom. In an embodiment, the ASGPR binding moiety is bound to the guanine at the N1, C2, N9, or C8 position. In an embodiment, the ASGPR binding moiety is bound to the guanine at the NI position. In an embodiment, the ASGPR binding moiety is bound to the guanine at the C2 position. In an embodiment, the ASGPR binding moiety is bound to the guanine at the N9 position. In an embodiment, the ASGPR binding moiety is bound to the guanine at the C8 position. In an embodiment, the ASGPR binding moiety is bound to a substituent on the guanosine nucleobase, e.g., an amine on the guanosine nucleobase (e.g., amine off the C2 position).

[0151] In an embodiment, the ASGPR binding moiety is bound to a cytosine nucleobase at a carbon atom. In an embodiment, the ASGPR binding moiety is bound to the cytosine at the C4, C5, or C6 position. In an embodiment, the ASGPR binding moiety is bound to the cytosine at the C4 position. In an embodiment, the ASGPR binding moiety is bound to the cytosine at the C5 position. In an embodiment, the ASGPR binding moiety is bound to the cytosine at the C6 position. In an embodiment, the ASGPR binding moiety is bound to a substituent on the cytosine nucleobase, e.g., an amine on the cytosine nucleobase (e.g., amine off the C4 position).

[0152] In an embodiment, the ASGPR binding moiety is bound to a uracil nucleobase at a carbon or nitrogen atom. In an embodiment, the ASGPR binding moiety is bound to the uracil at the N3, C5, or C6 position. In an embodiment, the ASGPR binding moiety is bound to the uracil at the N3 position. In an embodiment, the ASGPR binding moiety is bound to the uracil at the C5 position. In an embodiment, the ASGPR binding moiety is bound to the uracil at the C6 position.

[0153] In an embodiment, the ASGPR binding moiety is bound to a thymine nucleobase at a carbon or a nitrogen atom. In an embodiment, the ASGPR binding moiety is bound to the thymine at the N3, C5, or C6 position. In an embodiment, the ASGPR binding moiety is bound to the thymine at the N3 position. In an embodiment, the ASGPR binding moiety is bound to the thymine at the C5 position. In an embodiment, the ASGPR binding moiety is bound to the thymine at the C6 position. In an embodiment, the ASGPR binding moiety is bound to a substituent on the thymine nucleobase, e.g., a methyl on the thymine nucleobase (e.g., a methyl off the C5 position).

[0154] In an embodiment, the ASGPR binding moiety is bound to the terminal nucleotide of a TREM molecule. In an embodiment, the terminal nucleotide is an adenine, a guanine, a cytosine, thymine, a uracil, or a variant thereof. In an embodiment, the ASGPR binding moiety is bound to the 5′ and/or 3′ terminal nucleotide of the TREM molecule. In an embodiment, the ASGPR binding moiety is bound to the 5′ terminal nucleotide. In an embodiment, the ASGPR binding moiety is bound to the 3′ terminal nucleotide. In an embodiment, the ASGPR binding moiety is bound to the 5′ terminal nucleotide and the 3′ terminal nucleotide. In an embodiment, the ASGPR binding moiety is bound to the 5′ terminal nucleotide at the C5 hydroxyl group of the sugar moiety (e.g., ribose moiety). In an embodiment, the ASGPR binding moiety is bound to the terminal nucleotide at the 5′ hydroxyl group. In an embodiment, the ASGPR binding moiety is bound to the 3′ terminal nucleotide at the C3′ ribose position.

[0155] In an embodiment, a TREM entity includes a TREM comprising a sequence of Formula A; a TREM core fragment comprising a sequence of Formula B; or a TREM fragment comprising a portion of a TREM which TREM comprises a sequence of Formula A.

[0156] In an embodiment, a TREM comprises a sequence of Formula A: [L1]-[ASt Domain1]-[L2]-[DH Domain]-[L3]-[ACH Domain]-[VL Domain]-[TH Domain]-[L4]-[ASt Domain2], wherein the ASGPR binding moiety is present within the ASt Domain 1 (e.g., on a sugar moiety (e.g., ribose moiety), on the phosphate backbone, on a nucleobase, or at a terminus (e.g., the 5′ terminus) within the ASt Domain 1). In an embodiment, the ASGPR binding moiety is bound to a sugar moiety (e.g., ribose moiety) within the ASt Domain1. In an embodiment, the ASGPR binding moiety is bound to the phosphate backbone at any nucleotide position within the ASt Domain 1. In an embodiment, the ASGPR binding moiety is present on a nucleobase of a nucleotide within ASt Domain1. In an embodiment, the ASGPR binding moiety is present at the 5′ terminus within ASt Domain1 or at [L1]. In an embodiment, [VL Domain] is optional. In an embodiment, [L1] is optional.

[0157] In an embodiment, a TREM comprises a sequence of Formula A: [L1]-[ASt Domain1]-[L2]-[DH Domain]-[L3]-[ACH Domain]-[VL Domain]-[TH Domain]-[L4]-[ASt Domain2], wherein the ASGPR binding moiety is present within the ASt Domain 2 (e.g., on a sugar moiety (e.g., ribose moiety), on the phosphate backbone, on a nucleobase, or at a terminus (e.g., the 3′ terminus) within the ASt Domain 2). In an embodiment, the ASGPR binding moiety is bound to a sugar (e.g., ribose moiety) within the ASt Domain2. In an embodiment, the ASGPR binding moiety is bound to the phosphate backbone at any nucleotide position within the ASt Domain 2. In an embodiment, the ASGPR binding moiety is present on a nucleobase of a nucleotide within ASt Domain2. In an embodiment, the ASGPR binding moiety is present at the 3′ terminus within ASt Domain2. In an embodiment, the ASGPR binding moiety is present within an internucleotide linkage of ASt Domain2. In an embodiment, [VL Domain] is optional. In an embodiment, [L1] is optional.

[0158] In an embodiment, a TREM comprises a sequence of Formula A: [L1]-[ASt Domain1]-[L2]-[DH Domain]-[L3]-[ACH Domain]-[VL Domain]-[TH Domain]-[L4]-[ASt Domain2], wherein the ASGPR binding moiety is present within the either one or both of the ASt Domain 1 and ASt Domain 2 (e.g., on a sugar moiety (e.g., ribose moiety), on the phosphate backbone, on a nucleobase, or at a terminus (e.g., 5′ or 3′ terminus) within the ASt Domain 1 and/or ASt Domain 2). In an embodiment, the ASGPR binding moiety is bound to a sugar moiety (e.g., ribose moiety) within either one or both of the ASt Domain1 and ASt Domain 2. In an embodiment, the ASGPR binding moiety is bound to the phosphate backbone at any nucleotide position within either one or both of the ASt Domain 1 and ASt Domain 2. In an embodiment, the ASGPR binding moiety is present on a nucleobase of a nucleotide within ASt Domain1 or ASt Domain2. In an embodiment, the ASGPR binding moiety is present at the 5′ terminus within ASt Domain1 or [L1] or the 3′ terminus within ASt Domain2. In an embodiment, the ASGPR binding moiety is present within an internucleotide linkage of ASt Domain1 or ASt Domain2. In an embodiment, [VL Domain] is optional. In an embodiment, [L1] is optional.

[0159] In an embodiment, a TREM comprises a sequence of Formula A: [L1]-[ASt Domain1]-[L2]-[DH Domain]-[L3]-[ACH Domain]-[VL Domain]-[TH Domain]-[L4]-[ASt Domain2], wherein the ASGPR binding moiety is present within the DH Domain (e.g., on a sugar moiety (e.g., ribose moiety), on the phosphate backbone, or on a nucleobase of a nucleotide within the DH Domain). In an embodiment, the ASGPR binding moiety is bound to a sugar moiety (e.g., ribose moiety) within the DH Domain. In an embodiment, the ASGPR binding moiety is bound to the phosphate backbone at any nucleotide position within the DH Domain. In an embodiment, the ASGPR binding moiety is present on a nucleobase of a nucleotide within the DH Domain. In an embodiment, [VL Domain] is optional. In an embodiment, [L1] is optional.

[0160] In an embodiment, a TREM comprises a sequence of Formula A: [L1]-[ASt Domain1]-[L2]-[DH Domain]-[L3]-[ACH Domain]-[VL Domain]-[TH Domain]-[L4]-[ASt Domain2], wherein the ASGPR binding moiety is present within the ACH Domain (e.g., on a sugar moiety (e.g., ribose moiety), on the phosphate backbone, or on a nucleobase of a nucleotide within the ACH Domain). In an embodiment, the ASGPR binding moiety is bound to a sugar moiety (e.g., ribose moiety) within the ACH Domain. In an embodiment, the ASGPR binding moiety is bound to the phosphate backbone at any nucleotide position within the ACH Domain. In an embodiment, the ASGPR binding moiety is present on a nucleobase of a nucleotide within the ACH Domain. In an embodiment, [VL Domain] is optional. In an embodiment, [L1] is optional.

[0161] In an embodiment, a TREM comprises a sequence of Formula A: [L1]-[ASt Domain1]-[L2]-[DH Domain]-[L3]-[ACH Domain]-[VL Domain]-[TH Domain]-[L4]-[ASt Domain2], wherein the ASGPR binding moiety is present within the VL Domain (e.g., on a sugar moiety (e.g., ribose moiety), on the phosphate backbone, or on a nucleobase of a nucleotide within the VL Domain). In an embodiment, the ASGPR binding moiety is bound to a sugar moiety (e.g., ribose moiety) within the VL Domain. In an embodiment, the ASGPR binding moiety is bound to the phosphate backbone at any nucleotide position within the VL Domain. In an embodiment, the ASGPR binding moiety is present on a nucleobase of a nucleotide within the VL Domain. In an embodiment, [L1] is optional. In an embodiment, a TREM comprises a sequence of Formula A: [L1]-[ASt Domain1]-[L2]-[DH Domain]-[L3]-[ACH Domain]-[VL Domain]-[TH Domain]-[L4]-[ASt Domain2], wherein the ASGPR binding moiety is present within the TH Domain (e.g., on a sugar moiety (e.g., ribose moiety), on the phosphate backbone, or on a nucleobase of a nucleotide within the TH Domain). In an embodiment, the ASGPR binding moiety is bound to a sugar moiety (e.g., ribose moiety) within the TH Domain. In an embodiment, the ASGPR binding moiety is bound to the phosphate backbone at any nucleotide position within the TDH Domain. In an embodiment, the ASGPR binding moiety is present on a nucleobase of a nucleotide within the TH Domain. In an embodiment, [VL Domain] is optional. In an embodiment, [L1] is optional.

[0162] In an embodiment, a TREM comprises a sequence of Formula A: [L1]-[ASt Domain1]-[L2]-[DH Domain]-[L3]-[ACH Domain]-[VL Domain]-[TH Domain]-[L4]-[ASt Domain2], wherein the ASGPR binding moiety is bound to a nucleobase within one or more domains selected from [ASt Domain1], [DH Domain], [ACH Domain], [TH Domain], and/or [ASt Domain2]. In an embodiment, [VL Domain] is optional. In an embodiment, [L1] is optional.

[0163] In an embodiment, a TREM core fragment comprises a sequence of Formula B: [L1] y-[ASt Domain1]ₓ-[L2]_{y}-[DH Domain]_{y}-[L3]_{y}-[ACH Domain]ₓ-[VL Domain]_{y}-[TH Domain]_{y}-[L4]_{y}-[ASt Domain2]ₓ, wherein: x=1 and y=0 or 1, and the ASGPR binding moiety is present within either one or both of the ASt Domain 1 and ASt Domain 2 (e.g., on a sugar moiety (e.g., ribose moiety), on the phosphate backbone, or on a nucleobase within the ASt Domain 1 and/or ASt Domain 2). In an embodiment, the ASGPR binding moiety is bound to a sugar moiety (e.g., ribose moiety) within either one or both of the ASt Domain1 and AST Domain 2. In an embodiment, the ASGPR binding moiety is bound to the phosphate backbone at any nucleotide position within either one or both of the ASt Domain 1 and ASt Domain 2. In an embodiment, the ASGPR binding moiety is bound to a nucleobase within a nucleotide within one or both of ASt Domain1 and ASt Domain2. In an embodiment, y=0. In an embodiment, y=1.

[0164] In an embodiment, a TREM core fragment comprises a sequence of Formula B: [L1]_{y}-[ASt Domain1]ₓ-[L2]_{y}-[DH Domain]_{y}-[L3]_{y}-[ACH Domain]ₓ-[VL Domain]_{y}-[TH Domain]_{y}-[L4]_{y}-[ASt Domain2]ₓ, wherein: x=1 and y=0 or 1, and the ASGPR binding moiety is present within the DH Domain (e.g., on a sugar moiety (e.g., ribose moiety), on the phosphate backbone, or on a nucleobase within the DH Domain). In an embodiment, the ASGPR binding moiety is bound to a sugar moiety (e.g., ribose moiety) within the DH Domain. In an embodiment, the ASGPR binding moiety is bound to the phosphate backbone at any nucleotide position within the DH Domain. In an embodiment, the ASGPR binding moiety is bound to a nucleobase within a nucleotide within the DH Domain. In an embodiment, y=0. In an embodiment, y=1.

[0165] In an embodiment, a TREM core fragment comprises a sequence of Formula B: [L1]_{y}-[ASt Domain1]ₓ-[L2]_{y}-[DH Domain]_{y}-[L3]_{y}-[ACH Domain]ₓ-[VL Domain]_{y}-[TH Domain]_{y}-[L4]_{y}-[ASt Domain2]ₓ, wherein: x=1 and y=0 or 1, and the ASGPR binding moiety is present within the ACH Domain (e.g., on a sugar moiety (e.g., ribose moiety), on the phosphate backbone, or on a nucleobase within the ACH Domain). In an embodiment, the ASGPR binding moiety is bound to a sugar moiety (e.g., ribose moiety) within the ACH Domain. In an embodiment, the ASGPR binding moiety is bound to the phosphate backbone at any nucleotide position within the ACH Domain. the ASGPR binding moiety is bound to a nucleobase within a nucleotide within the ACH Domain. In an embodiment, y=0. In an embodiment, y=1.

[0166] In an embodiment, a TREM core fragment comprises a sequence of Formula B: [L1]_{y}-[ASt Domain1]ₓ-[L2]_{y}-[DH Domain]_{y}-[L3]_{y}-[ACH Domain]ₓ-[VL Domain]_{y}-[TH Domain]_{y}-[L4]_{y}-[ASt Domain2]ₓ, wherein: x=1 and y=0 or 1, and the ASGPR binding moiety is present within the VL Domain (e.g., on a sugar moiety (e.g., ribose moiety) or on the phosphate backbone within the VL Domain). In an embodiment, the ASGPR binding moiety is bound to a sugar moiety (e.g., ribose moiety) within the VL Domain. In an embodiment, the ASGPR binding moiety is bound to the phosphate backbone at any nucleotide position within the VL Domain. In an embodiment, y=0. In an embodiment, y=1.

[0167] In an embodiment, a TREM core fragment comprises a sequence of Formula B: [L1]_{y}-[ASt Domain1]ₓ-[L2]_{y}-[DH Domain]_{y}-[L3]_{y}-[ACH Domain]ₓ-[VL Domain]_{y}-[TH Domain]_{y}-[L4]_{y}-[ASt Domain2]ₓ, wherein: x=1 and y=0 or 1, and the ASGPR binding moiety is present within the TH Domain (e.g., on a sugar moiety (e.g., ribose moiety), on the phosphate backbone, or on a nucleobase within the TH Domain). In an embodiment, the ASGPR binding moiety is bound to a sugar moiety (e.g., ribose moiety) within the TH Domain. In an embodiment, the ASGPR binding moiety is bound to the phosphate backbone at any nucleotide position within the TH Domain. In an embodiment, the ASGPR binding moiety is bound to a nucleobase within a nucleotide within the TH Domain. In an embodiment, y=0. In an embodiment, y=1.

[0168] In an embodiment, a TREM core fragment comprises a sequence of Formula B: [L1]_{y}-[ASt Domain1]ₓ-[L2]_{y}-[DH Domain]_{y}-[L3]_{y}-[ACH Domain]ₓ-[VL Domain]_{y}-[TH Domain]_{y}-[L4]_{y}-[ASt Domain2]ₓ, wherein: x=1 and y=0 or 1, and the ASGPR binding moiety is bound to a sugar moiety (e.g., ribose moiety) of a nucleotide within one or more domains selected from [ASt Domain1], [DH Domain], [ACH Domain], [TH Domain], and/or [ASt Domain2]. In an embodiment, y=0. In an embodiment, y=1.

[0169] In an embodiment, a TREM core fragment comprises a sequence of Formula B: [L1]_{y}-[ASt Domain1]ₓ-[L2]_{y}-[DH Domain]_{y}-[L3]_{y}-[ACH Domain]ₓ-[VL Domain]_{y}-[TH Domain]_{y}-[L4]_{y}-[ASt Domain2]ₓ, wherein: x=1 and y=0 or 1, and the ASGPR binding moiety is bound to a phosphate backbone of a nucleotide within one or more domains selected from [ASt Domain1], [DH Domain], [ACH Domain], [TH Domain], and/or [ASt Domain2]. In an embodiment, y=0. In an embodiment, y=1.

[0170] In an embodiment, a TREM core fragment comprises a sequence of Formula B: [L1]_{y}-[ASt Domain1]ₓ-[L2]_{y}-[DH Domain]_{y}-[L3]_{y}-[ACH Domain]ₓ-[VL Domain]_{y}-[TH Domain]_{y}-[L4]_{y}-[ASt Domain2]ₓ, wherein: x=1 and y=0 or 1, and the ASGPR binding moiety is bound to a nucleobase within one or more domains selected from [ASt Domain1], [DH Domain], [ACH Domain], [TH Domain], and/or [ASt Domain2]. In an embodiment, y=0. In an embodiment, y=1.

[0171] In an embodiment, a TREM fragment comprises a portion of a TREM, wherein the TREM comprises a sequence of Formula A: [L1]-[ASt Domain1]-[L2]-[DH Domain]-[L3]-[ACH Domain]-[VL Domain]-[TH Domain]-[L4]-[ASt Domain2], and wherein the TREM fragment comprises: one, two, three or all or any combination of the following: a TREM half (e.g., from a cleavage in the ACH Domain, e.g., in the anticodon sequence, e.g., a 5′half or a 3′ half); a 5′ fragment (e.g., a fragment comprising the 5′ end, e.g., from a cleavage in a DH Domain or the ACH Domain); a 3′ fragment (e.g., a fragment comprising the 3′ end, e.g., from a cleavage in the TH Domain); or an internal fragment (e.g., from a cleavage in any one of the ACH Domain, DH Domain or TH Domain). Exemplary TREM fragments include TREM halves (e.g., from a cleavage in the ACHD, e.g., 5′TREM halves or 3′ TREM halves), a 5′ fragment (e.g., a fragment comprising the 5′ end, e.g., from a cleavage in a DHD or the ACHD), a 3′ fragment (e.g., a fragment comprising the 3′ end of a TREM, e.g., from a cleavage in the THD), or an internal fragment (e.g., from a cleavage in one or more of the ACHD, DHD or THD).

[0172] In an embodiment, a TREM, a TREM core fragment or a TREM fragment can be charged with an amino acid (e.g., a cognate amino acid); charged with a non-cognate amino acid (e.g., a mischarged TREM (mTREM)); or not charged with an amino acid (e.g., an uncharged TREM (uTREM)). In an embodiment, a TREM, a TREM core fragment or a TREM fragment can be charged with an amino acid selected from alanine, arginine, asparagine, aspartate, cysteine, glutaminc, glutamate, glycinc, histidine, isolcucine, methionine, leucinc, lysinc, phenylalanine, proline, serine, threonine, tryptophan, tyrosine, or valine.

[0173] In an embodiment, the TREM, TREM core fragment or TREM fragment is a cognate TREM. In an embodiment, the TREM, TREM core fragment or TREM fragment is a non-cognate TREM. In an embodiment, the TREM, TREM core fragment or TREM fragment recognizes a codon provided in Table 2 or Table 3.

TABLE 2
List of codons
AAA
AAC
AAG
AAU
ACA
ACC
ACG
ACU
AGA
AGC
AGG
AGU
AUA
AUC
AUG
AUU
CAA
CAC
CAG
CAU
CCA
CCC
CCG
CCU
CGA
CGC
CGG
CGU
CUA
CUC
CUG
CUU
GAA
GAC
GAG
GAU
GCA
GCC
GCG
GCU
GGA
GGC
GGG
GGU
GUA
GUC
GUG
GUU
UAA
UAC
UAG
UAU
UCA
UCC
UCG
UCU
UGA
UGC
UGG
UGU
UUA
UUC
UUG
UUU

TABLE 3
Amino acids and corresponding codons

| Amino Acid | mRNA codons |
|---|---|
| Alanine | GCU, GCC, GCA, GCG |
| Arginine | CGU, CGC, CGA, CGG, AGA, AGG |
| Asparagine | AAU, AAC |
| Aspartate | GAU, GAC |
| Cysteine | UGU, UGC |
| Glutamate | GAA, GAG |
| Glutamine | CAA, CAG |
| Glycine | GGU, GGC, GGA, GGG |
| Histidine | CAU, CAC |
| Isoleucine | AUU, AUC, AUA |
| Leucine | UUA, UUG, CUU, CUC, CUA, CUG |
| Lysine | AAA, AAG |
| Methionine | AUG |
| Phenylalanine | UUU, UUC |
| Proline | CCU, CCC, CCA, CCG |
| Serine | UCU, UCC, UCA, UCG, AGU, AGC |
| Stop | UAA, UAG, UGA |
| Threonine | ACU, ACC, ACA, ACG |
| Tryptophan | UGG |
| Tyrosine | UAU, UAC |
| Valine | GUU, GUC, GUA, GUG |

[0174] In an embodiment, a TREM comprises a ribonucleic acid (RNA) sequence encoded by a deoxyribonucleic acid (DNA) sequence disclosed in Table 1, e.g., any one of SEQ ID NOs: 1-451 disclosed in Table 1. In an embodiment, a TREM comprises an RNA sequence at least 60%, 65%, 70%, 75%, 80%, 82%, 85%, 87%, 88%, 90%, 92%, 95%, 96%, 97%, 98%, or 99% identical to an RNA sequence encoded by a DNA sequence provided in Table 1, e.g., any one of SEQ ID NOs: 1-451 disclosed in Table 1. In an embodiment, a TREM comprises an RNA sequence encoded by a DNA sequence at least 60%, 65%, 70%, 75%, 80%, 82%, 85%, 87%, 88%, 90%, 92%, 95%, 96%, 97%, 98%, or 99% identical to a DNA sequence provided in Table 1, e.g., any one of SEQ ID NOs: 1-451 disclosed in Table 1.

[0175] In an embodiment, a TREM, a TREM core fragment, or TREM fragment comprises at least 5, 10, 15, 20, 25, or 30 consecutive nucleotides of an RNA sequence encoded by a DNA sequence disclosed in Table 1, e.g., at least 5, 10, 15, 20, 25, or 30 consecutive nucleotides of an RNA sequence encoded by any one of SEQ ID NOs: 1-451 disclosed in Table 1. In an embodiment, a TREM, a TREM core fragment, or TREM fragment comprises at least 5, 10, 15, 20, 25, or 30 consecutive nucleotides of an RNA sequence at least 60%, 65%, 70%, 75%, 80%, 82%, 85%, 87%, 88%, 90%, 92%, 95%, 96%, 97%, 98%, or 99% identical to an RNA sequence encoded by a DNA sequence provided in Table 1, e.g., any one of SEQ ID NOs: 1-451 disclosed in Table 1. In an embodiment, a TREM, a TREM core fragment, or TREM fragment comprises at least 5, 10, 15, 20, 25, or 30 consecutive nucleotides of an RNA sequence encoded by a DNA sequence at least 60%, 65%, 70%, 75%, 80%, 82%, 85%, 87%, 88%, 90%, 92%, 95%, 96%, 97%, 98%, or 99% identical to a DNA sequence provided in Table 1, e.g., any one of SEQ ID NOs: 1-451 disclosed in Table 1.

[0176] In an embodiment, a TREM core fragment or a TREM fragment comprises at least 5%, 10%, 15%, 20%, 25%, 30%, 35%, 40%, 50%, 55%, 60%, 65%, 70%, 75%, 80%, 85%, 90%, 95%, 96%, 97%, 98% or 99% of an RNA sequence encoded by a DNA sequence provided in Table 1, e.g., any one of SEQ ID NOs: 1-451 disclosed in Table 1. In an embodiment, a TREM core fragment or a TREM fragment comprises at least 5%, 10%, 15%, 20%, 25%, 30%, 35%, 40%, 50%, 55%, 60%, 65%, 70%, 75%, 80%, 85%, 90%, 95%, 96%, 97%, 98% or 99% of an RNA sequence at least 80%, 85%, 90%, 95%, 96%, 97%, 98%, or 99% identical to an RNA sequence encoded by a DNA sequence provided in Table 1, e.g., any one of SEQ ID NOs: 1-451 disclosed in Table 1. In an embodiment, a TREM core fragment or a TREM fragment comprises at least 5%, 10%, 15%, 20%, 25%, 30%, 35%, 40%, 50%, 55%, 60%, 65%, 70%, 75%, 80%, 85%, 90%, 95%, 96%, 97%, 98% or 99% of an RNA sequence encoded by a DNA sequence at least 80%, 85%, 90%, 95%, 96%, 97%, 98%, or 99% identical to a DNA sequence provided in Table 1, e.g., any one of SEQ ID NOs: 1-451 disclosed in Table 1.

[0177] In an embodiment, a TREM core fragment or a TREM fragment comprises at least 5 ribonucleotides (nt), 10 nt, 15 nt, 20 nt, 25 nt, 30 nt, 35 nt, 40 nt, 45 nt, 50 nt, 55 nt or 60 nt (but less than the full length) of an RNA sequence encoded by a DNA sequence disclosed in Table 1, e.g., any one of SEQ ID NOs: 1-451 disclosed in Table 1. In an embodiment, a TREM core fragment or a TREM fragment comprises at least 5 ribonucleotides (nt), 10 nt, 15 nt, 20 nt, 25 nt, 30 nt, 35 nt, 40 nt, 45 nt, 50 nt, 55 nt or 60 nt (but less than the full length) of an RNA sequence which is at least 80%, 85%, 90%, 95%, 96%, 97%, 98%, 99% or 100% identical to an RNA sequence encoded by a DNA sequence provided in Table 1, e.g., any one of SEQ ID NOs: 1-451 disclosed in Table 1. In an embodiment, a TREM core fragment or a TREM fragment comprises at least 5 ribonucleotides (nt), 10 nt, 15 nt, 20 nt, 25 nt, 30 nt, 35 nt, 40 nt, 45 nt, 50 nt, 55 nt or 60 nt (but less than the full length) of an RNA sequence encoded by a DNA sequence with at least 80%, 82%, 85%, 87%, 88%, 90%, 92%, 95%, 96%, 97%, 98%, 99% or 100% identity to a DNA sequence provided in Table 1, e.g., any one of SEQ ID NOs: 1-451 disclosed in Table 1.

[0178] In an embodiment, a TREM core fragment or a TREM fragment comprises a sequence of a length of between 10-90 ribonucleotides (rnt), between 10-80 rnt, between 10-70 rnt, between 10-60 rnt, between 10-50 rnt, between 10-40 rnt, between 10-30 rnt, between 10-20 rnt, between 20-90 rnt, between 20-80 rnt, 20-70 rnt, between 20-60 rnt, between 20-50 rnt, between 20-40 rnt, between 30-90 rnt, between 30-80 rnt, between 30-70 rnt, between 30-60 rnt, or between 30-50 rnt.

[0179] In any and all embodiments, the TREM described herein comprises a consensus sequence of Formula I _{ZZZ},
[0180] R₀-R₁-R₂-R₃-R₄-R₅-R₆-R₇-R₈-R₉-R₁₀-R₁₁-R₁₂-R₁₃-R₁₄-R₁₅-R₁₆-R₁₇-R₁₈-R₁₉-R₂₀-R₂₁-R₂₂-R₂₃-R₂₄-R₂₅-R₂₆-R₂₇-R₂₈-R₂₉-R₃₀-R₃₁-R₃₂-R₃₃-R₃₄-R₃₅-R₃₆-R₃₇-R₃₈-R₃₉-R₄₀-R₄₁-R₄₂-R₄₃- R₄₄-R₄₅-R₄₆-[R₄₇]ₓ₁-R₄₈-R₄₉-R₅₀-R₅₁-R₅₂-R₅₃-R₅₄-R₅₅-R₅₆-R₅₇-R₅₈-R₅₉-R₆₀-R₆₁-R₆₂-R₆₃-R₆₄-R₆₅-R₆₆-R₆₇-R₆₈-R₆₉-R₇₀-R₇₁-R₇₂
[0181] wherein (i) _{ZZZ} indicates any of the twenty amino acids; (ii) Formula I corresponds to all species; (iii) x=1-271 (e.g., x=1-250, x=1-225, x=1-200, x=1-175, x=1-150, x=1-125, x=1-100, x=1-75, x=1-50, x=1-40, x=1-30, x=1-29, x=1-28, x=1-27, x=1-26, x=1-25, x=1-24, x=1-23, x=1-22, x=1-21, x=1-20, x=1-19, x=1-18, x=1-17, x=1-16, x=1-15, x=1-14, x=1-13, x=1-12, x=1-11, x=1-10, x=10-271, x=20-271, x=30-271, x=40-271, x=50-271, x=60-271, x=70-271, x=80-271, x=100-271, x=125-271, x=150-271, x=175-271, x=200-271, x=225-271, x=1, x=2, x=3, x=4, x=5, x=6, x=7, x=8, x=9, x=10, x=11, x=12, x=13, x=14, x=15, x=16, x=17, x=18, x=19, x=20, x=21, x=22, x=23, x=24, x=25, x=26, x=27, x=28, x=29, x=30, x=40, x=50, x=60, x=70, x=80, x=90, x=100, x=110, x=125, x=150, x=175, x=200, x=225, x=250, or x=271); and (iv) an ASGPR binding moiety is bound to a sugar within one or more of R₀-R₁-R₂-R₃-R₄-R₅-R₆-R₇-R₈ or (v) an ASGPR binding moiety is bound to a sugar within one or more of R₆₁-R₆₂-R₆₃-R₆₄-R₆₅-R₆₆-R₆₇-R₆₈-R₆₉-R₇₀-R₇₁-R₇₂.

[0182] In any and all embodiments, the TREM described herein comprises a consensus sequence of Formula I ZZZ,
[0183] R0-R1-R2-R3-R4-R5-R6-R7-R8-R9-R10-R11-R12-R13-R14-R15-R16-R17-R18-R19-R20-R21-R22-R23-R24-R25-R26-R27-R28-R29-R30-R31-R32-R33-R34-R35-R36-R37-R38-R39-R40-R41-R42-R43-R44-R45-R46-[R47]x1-R48-R49-R50-R51-R52-R53-R54-R55-R56-R57-R58-R59-R60-R61-R62-R63-R64-R65-R66-R67-R68-R69-R70-R71-R72
[0184] wherein (i) ZZZ indicates any of the twenty amino acids; (ii) Formula I corresponds to all species; (iii) x=1-271 (e.g., x=1-250, x=1-225, x=1-200, x=1-175, x=1-150, x=1-125, x=1-100, x=1-75, x=1-50, x=1-40, x=1-30, x=1-29, x=1-28, x=1-27, x=1-26, x=1-25, x=1-24, x=1-23, x=1-22, x=1-21, x=1-20, x=1-19, x=1-18, x=1-17, x=1-16, x=1-15, x=1-14, x=1-13, x=1-12, x=1-11, x=1-10, x=10-271, x=20-271, x=30-271, x=40-271, x=50-271, x=60-271, x=70-271, x=80-271, x=100-271, x=125-271, x=150-271, x=175-271, x=200-271, x=225-271, x=1, x=2, x=3, x=4, x=5, x=6, x=7, x=8, x=9, x=10, x=11, x=12, x=13, x=14, x=15, x=16, x=17, x=18, x=19, x=20, x=21, x=22, x=23, x=24, x=25, x=26, x=27, x=28, x=29, x=30, x=40, x=50, x=60, x=70, x=80, x=90, x=100, x=110, x=125, x=150, x=175, x=200, x=225, x=250, or x=271); and (iv) an ASGPR binding moiety is bound to the phosphate backbone at any nucleotide position within one or more of R0-R1-R2-R3-R4-R5-R6-R7-R8 or (v) an ASGPR binding moiety is bound to the phosphate backbone at any nucleotide position within one or more of R61-R62-R63-R64-R65-R66-R67-R68-R69-R70-R71-R72.

[0185] In any and all embodiments, the TREM described herein comprises a consensus sequence of Formula I _{ZZZ},
[0186] R₀-R₁-R₂-R₃-R₄-R₅-R₆-R₇-R₈-R₉-R₁₀-R₁₁-R₁₂-R₁₃-R₁₄-R₁₅-R₁₆-R₁₇-R₁₈-R₁₉-R₂₀-R₂₁-R₂₂-R₂₃-R₂₄-R₂₅-R₂₆-R₂₇-R₂₈-R₂₉-R₃₀-R₃₁-R₃₂-R₃₃-R₃₄-R₃₅-R₃₆-R₃₇-R₃₈-R₃₉-R₄₀-R₄₁-R₄₂-R₄₃- R₄₄-R₄₅-R₄₆-[R₄₇]ₓ₁-R₄₈-R₄₉-R₅₀-R₅₁-R₅₂-R₅₃-R₅₄-R₅₅-R₅₆-R₅₇-R₅₈-R₅₉-R₆₀-R₆₁-R₆₂-R₆₃-R₆₄-R₆₅-R₆₆-R₆₇-R₆₈-R₆₉-R₇₀-R₇₁-R₇₂
[0187] wherein (i) _{ZZZ} indicates any of the twenty amino acids; (ii) Formula I corresponds to all species; (iii) x=1-271 (e.g., x=1-250, x=1-225, x=1-200, x=1-175, x=1-150, x=1-125, x=1-100, x=1-75, x=1-50, x=1-40, x=1-30, x=1-29, x=1-28, x=1-27, x=1-26, x=1-25, x=1-24, x=1-23, x=1-22, x=1-21, x=1-20, x=1-19, x=1-18, x=1-17, x=1-16, x=1-15, x=1-14, x=1-13, x=1-12, x=1-11, x=1-10, x=10-271, x=20-271, x=30-271, x=40-271, x=50-271, x=60-271, x=70-271, x=80-271, x=100-271, x=125-271, x=150-271, x=175-271, x=200-271, x=225-271, x=1, x=2, x=3, x=4, x=5, x=6, x=7, x=8, x=9, x=10, x=11, x=12, x=13, x=14, x=15, x=16, x=17, x=18, x=19, x=20, x=21, x=22, x=23, x=24, x=25, x=26, x=27, x=28, x=29, x=30, x=40, x=50, x=60, x=70, x=80, x=90, x=100, x=110, x=125, x=150, x=175, x=200, x=225, x=250, or x=271); and (iv) an ASGPR binding moiety is bound to a nucleobase within one or more of R₀-R₁-R₂-R₃-R₄-R₅-R₆-R₇-R₈ or (v) an ASGPR binding moiety is bound to a nucleobase within one or more of R₆₁-R₆₂-R₆₃-R₆₄-R₆₅-R₆₆-R₆₇-R₆₈-R₆₉-R₇₀-R₇₁-R₇₂.

[0188] In any and all embodiments, the TREM described herein comprises a consensus sequence of Formula II _{ZZZ},
[0189] R₀-R₁-R₂-R₃-R₄-R₅-R₆-R₇-R₈-R₉-R₁₀-R₁₁-R₁₂-R₁₃-R₁₄-R₁₅-R₁₆-R₁₇-R₁₈-R₁₉-R₂₀-R₂₁-R₂₂-R₂₃-R₂₄-R₂₅-R₂₆-R₂₇-R₂₈-R₂₉-R₃₀-R₃₁-R₃₂-R₃₃-R₃₄-R₃₅-R₃₆-R₃₇-R₃₈-R₃₉-R₄₀-R₄₁-R₄₂-R₄₃- R₄₄-R₄₅-R₄₆-[R₄₇]ₓ₁-R₄₈-R₄₉-R₅₀-R₅₁-R₅₂-R₅₃-R₅₄-R₅₅-R₅₆-R₅₇-R₅₈-R₅₉-R₆₀-R₆₁-R₆₂-R₆₃-R₆₄-R₆₅-R₆₆-R₆₇-R₆₈-R₆₉-R₇₀-R₇₁-R₇₂
[0190] wherein (i) _{ZZZ} indicates any of the twenty amino acids; (ii) Formula II corresponds to mammals; (iii) x=1-271 (e.g., x=1-250, x=1-225, x=1-200, x=1-175, x=1-150, x=1-125, x=1-100, x=1-75, x=1-50, x=1-40, x=1-30, x=1-29, x=1-28, x=1-27, x=1-26, x=1-25, x=1- 24, x=1-23, x=1-22, x=1-21, x=1-20, x=1-19, x=1-18, x=1-17, x=1-16, x=1-15, x=1-14, x=1-13, x=1-12, x=1-11, x=1-10, x=10-271, x=20-271, x=30-271, x=40-271, x=50-271, x=60-271, x=70-271, x=80-271, x=100-271, x=125-271, x=150-271, x=175-271, x=200-271, x=225-271, x=1, x=2, x=3, x=4, x=5, x=6, x=7, x=8, x=9, x=10, x=11, x=12, x=13, x=14, x=15, x=16, x=17, x=18, x=19, x=20, x=21, x=22, x=23, x=24, x=25, x=26, x=27, x=28, x=29, x=30, x=40, x=50, x=60, x=70, x=80, x=90, x=100, x=110, x=125, x=150, x=175, x=200, x=225, x=250, or x=271); and (iv) an ASGPR binding moiety is bound to a sugar within one or more of R₀-R₁-R₂-R₃-R₄-R₅-R₆-R₇-R₈ or (v) an ASGPR binding moiety is bound to a sugar within one or more of R₆₁-R₆₂-R₆₃-R₆₄-R₆₅-R₆₆-R₆₇-R₆₈-R₆₉-R₇₀-R₇₁-R₇₂.

[0191] In any and all embodiments, the TREM described herein comprises a consensus sequence of Formula II ZZZ,
[0192] R0-R1-R2-R3-R4-R5-R6-R7-R8-R9-R10-R11-R12-R13-R14-R15-R16-R17-R18-R19-R20-R21-R22-R23-R24-R25-R26-R27-R28-R29-R30-R31-R32-R33-R34-R35-R36-R37-R38-R39-R40-R41-R42-R43-R44-R45-R46-[R47]x1-R48-R49-R50-R51-R52-R53-R54-R55-R56-R57-R58-R59-R60-R61-R62-R63-R64-R65-R66-R67-R68-R69-R70-R71-R72
[0193] wherein (i) ZZZ indicates any of the twenty amino acids; (ii) Formula II corresponds to mammals; (iii) x=1-271 (e.g., x=1-250, x=1-225, x=1-200, x=1-175, x=1-150, x=1-125, x=1-100, x=1-75, x=1-50, x=1-40, x=1-30, x=1-29, x=1-28, x=1-27, x=1-26, x=1-25, x=1- 24, x=1-23, x=1-22, x=1-21, x=1-20, x=1-19, x=1-18, x=1-17, x=1-16, x=1-15, x=1-14, x=1-13, x=1-12, x=1-11, x=1-10, x=10-271, x=20-271, x=30-271, x=40-271, x=50-271, x=60-271, x=70-271, x=80-271, x=100-271, x=125-271, x=150-271, x=175-271, x=200-271, x=225-271, x=1, x=2, x=3, x=4, x=5, x=6, x=7, x=8, x=9, x=10, x=11, x=12, x=13, x=14, x=15, x=16, x=17, x=18, x=19, x=20, x=21, x=22, x=23, x=24, x=25, x=26, x=27, x=28, x=29, x=30, x=40, x=50, x=60, x=70, x=80, x=90, x=100, x=110, x=125, x=150, x=175, x=200, x=225, x=250, or x=271); and (iv) an ASGPR binding moiety is bound to the phosphate backbone at any nucleotide position within one or more of R0-R1-R2-R3-R4-R5-R6-R7-R8 or (v) an ASGPR binding moiety is bound to the phosphate backbone at any nucleotide position within one or more of R61-R62-R63-R64-R65-R66-R67-R68-R69-R70-R71-R72.

[0194] In any and all embodiments, the TREM described herein comprises a consensus sequence of Formula II _{ZZZ},
[0195] R₀-R₁-R₂-R₃-R₄-R₅-R₆-R₇-R₈-R₉-R₁₀-R₁₁-R₁₂-R₁₃-R₁₄-R₁₅-R₁₆-R₁₇-R₁₈-R₁₉-R₂₀-R₂₁-R₂₂-R₂₃-R₂₄-R₂₅-R₂₆-R₂₇-R₂₈-R₂₉-R₃₀-R₃₁-R₃₂-R₃₃-R₃₄-R₃₅-R₃₆-R₃₇-R₃₈-R₃₉-R₄₀-R₄₁-R₄₂-R₄₃- R₄₄-R₄₅-R₄₆-[R₄₇]ₓ₁-R₄₈-R₄₉-R₅₀-R₅₁-R₅₂-R₅₃-R₅₄-R₅₅-R₅₆-R₅₇-R₅₈-R₅₉-R₆₀-R₆₁-R₆₂-R₆₃-R₆₄-R₆₅-R₆₆-R₆₇-R₆₈-R₆₉-R₇₀-R₇₁-R₇₂
[0196] wherein (i) _{ZZZ} indicates any of the twenty amino acids; (ii) Formula II corresponds to mammals; (iii) x=1-271 (e.g., x=1-250, x=1-225, x=1-200, x=1-175, x=1-150, x=1-125, x=1-100, x=1-75, x=1-50, x=1-40, x=1-30, x=1-29, x=1-28, x=1-27, x=1-26, x=1-25, x=1- 24, x=1-23, x=1-22, x=1-21, x=1-20, x=1-19, x=1-18, x=1-17, x=1-16, x=1-15, x=1-14, x=1-13, x=1-12, x=1-11, x=1-10, x=10-271, x=20-271, x=30-271, x=40-271, x=50-271, x=60-271, x=70-271, x=80-271, x=100-271, x=125-271, x=150-271, x=175-271, x=200-271, x=225-271, x=1, x=2, x=3, x=4, x=5, x=6, x=7, x=8, x=9, x=10, x=11, x=12, x=13, x=14, x=15, x=16, x=17, x=18, x=19, x=20, x=21, x=22, x=23, x=24, x=25, x=26, x=27, x=28, x=29, x=30, x=40, x=50, x=60, x=70, x=80, x=90, x=100, x=110, x=125, x=150, x=175, x=200, x=225, x=250, or x=271); and (iv) an ASGPR binding moiety is bound to a nucleobase within one or more of R₀-R₁-R₂-R₃-R₄-R₅-R₆-R₇-R₈ or (v) an ASGPR binding moiety is bound to a nucleobase within one or more of R₆₁-R₆₂-R₆₃-R₆₄-R₆₅-R₆₆-R₆₇-R₆₈-R₆₉-R₇₀-R₇₁-R₇₂.

[0197] In any and all embodiments, the TREM described herein comprises a consensus sequence of Formula IIII _{ZZZ},
[0198] R₀-R₁-R₂-R₃-R₄-R₅-R₆-R₇-R₈-R₉-R₁₀-R₁₁-R₁₂-R₁₃-R₁₄-R₁₅-R₁₆-R₁₇-R₁₈-R₁₉-R₂₀-R₂₁-R₂₂-R₂₃-R₂₄-R₂₅-R₂₆-R₂₇-R₂₈-R₂₉-R₃₀-R₃₁-R₃₂-R₃₃-R₃₄-R₃₅-R₃₆-R₃₇-R₃₈-R₃₉-R₄₀-R₄₁-R₄₂-R₄₃- R₄₄-R₄₅-R₄₆-[R₄₇]ₓ₁-R₄₈-R₄₉-R₅₀-R₅₁-R₅₂-R₅₃-R₅₄-R₅₅-R₅₆-R₅₇-R₅₈-R₅₉-R₆₀-R₆₁-R₆₂-R₆₃-R₆₄-R₆₅-R₆₆-R₆₇-R₆₈-R₆₉-R₇₀-R₇₁-R₇₂
[0199] wherein (i) _{ZZZ} indicates any of the twenty amino acids; (ii) Formula III corresponds to humans; (iii) x=1-271 (e.g., x=1-250, x=1-225, x=1-200, x=1-175, x=1-150, x=1-125, x=1-100, x=1-75, x=1-50, x=1-40, x=1-30, x=1-29, x=1-28, x=1-27, x=1-26, x=1-25, x=1-24, x=1-23, x=1-22, x=1-21, x=1-20, x=1-19, x=1-18, x=1-17, x=1-16, x=1-15, x=1-14, x=1-13, x=1-12, x=1-11, x=1-10, x=10-271, x=20-271, x=30-271, x=40-271, x=50-271, x=60-271, x=70-271, x=80-271, x=100-271, x=125-271, x=150-271, x=175-271, x=200-271, x=225-271, x=1, x=2, x=3, x=4, x=5, x=6, x=7, x=8, x=9, x=10, x=11, x=12, x=13, x=14, x=15, x=16, x=17, x=18, x=19, x=20, x=21, x=22, x=23, x=24, x=25, x=26, x=27, x=28, x=29, x=30, x=40, x=50, x=60, x=70, x=80, x=90, x=100, x=110, x=125, x=150, x=175, x=200, x=225, x=250, or x=271); and (iv) an ASGPR binding moiety is bound to a sugar within one or more of R₀-R₁-R₂-R₃-R₄-R₅-R₆-R₇-R₈ or (v) an ASGPR binding moiety is bound to a sugar within one or more of R₆₁-R₆₂-R₆₃-R₆₄-R₆₅-R₆₆-R₆₇-R₆₈-R₆₉-R₇₀-R₇₁-R₇₂.

[0200] In any and all embodiments, the TREM described herein comprises a consensus sequence of Formula IIII _{ZZZ},
[0201] R₀-R₁-R₂-R₃-R₄-R₅-R₆-R₇-R₈-R₉-R₁₀-R₁₁-R₁₂-R₁₃-R₁₄-R₁₅-R₁₆-R₁₇-R₁₈-R₁₉-R₂₀-R₂₁-R₂₂-R₂₃-R₂₄-R₂₅-R₂₆-R₂₇-R₂₈-R₂₉-R₃₀-R₃₁-R₃₂-R₃₃-R₃₄-R₃₅-R₃₆-R₃₇-R₃₈-R₃₉-R₄₀-R₄₁-R₄₂-R₄₃- R₄₄-R₄₅-R₄₆-[R₄₇]ₓ₁-R₄₈-R₄₉-R₅₀-R₅₁-R₅₂-R₅₃-R₅₄-R₅₅-R₅₆-R₅₇-R₅₈-R₅₉-R₆₀-R₆₁-R₆₂-R₆₃-R₆₄-R₆₅-R₆₆-R₆₇-R₆₈-R₆₉-R₇₀-R₇₁-R₇₂
[0202] wherein (i) _{ZZZ} indicates any of the twenty amino acids; (ii) Formula III corresponds to humans; (iii) x=1-271 (e.g., x=1-250, x=1-225, x=1-200, x=1-175, x=1-150, x=1-125, x=1-100, x=1-75, x=1-50, x=1-40, x=1-30, x=1-29, x=1-28, x=1-27, x=1-26, x=1-25, x=1-24, x=1-23, x=1-22, x=1-21, x=1-20, x=1-19, x=1-18, x=1-17, x=1-16, x=1-15, x=1-14, x=1-13, x=1-12, x=1-11, x=1-10, x=10-271, x=20-271, x=30-271, x=40-271, x=50-271, x=60-271, x=70-271, x=80-271, x=100-271, x=125-271, x=150-271, x=175-271, x=200-271, x=225-271, x=1, x=2, x=3, x=4, x=5, x=6, x=7, x=8, x=9, x=10, x=11, x=12, x=13, x=14, x=15, x=16, x=17, x=18, x=19, x=20, x=21, x=22, x=23, x=24, x=25, x=26, x=27, x=28, x=29, x=30, x=40, x=50, x=60, x=70, x=80, x=90, x=100, x=110, x=125, x=150, x=175, x=200, x=225, x=250, or x=271); and (iv) an ASGPR binding moiety is bound to the phosphate backbone at any nucleotide position within one or more of R₀-R₁-R₂-R₃-R₄-R₅-R₆-R₇-R₈ or (v) an ASGPR binding moiety is bound to the phosphate backbone at any nucleotide position within one or more of R₆₁-R₆₂-R₆₃-R₆₄-R₆₅-R₆₆-R₆₇-R₆₈-R₆₉-R₇₀-R₇₁-R₇₂.

[0203] In any and all embodiments, the TREM described herein comprises a consensus sequence of Formula IIII _{ZZZ},
[0204] R₀-R₁-R₂-R₃-R₄-R₅-R₆-R₇-R₈-R₉-R₁₀-R₁₁-R₁₂-R₁₃-R₁₄-R₁₅-R₁₆-R₁₇-R₁₈-R₁₉-R₂₀-R₂₁-R₂₂-R₂₃-R₂₄-R₂₅-R₂₆-R₂₇-R₂₈-R₂₉-R₃₀-R₃₁-R₃₂-R₃₃-R₃₄-R₃₅-R₃₆-R₃₇-R₃₈-R₃₉-R₄₀-R₄₁-R₄₂-R₄₃- R₄₄-R₄₅-R₄₆-[R₄₇]ₓ₁-R₄₈-R₄₉-R₅₀-R₅₁-R₅₂-R₅₃-R₅₄-R₅₅-R₅₆-R₅₇-R₅₈-R₅₉-R₆₀-R₆₁-R₆₂-R₆₃-R₆₄-R₆₅-R₆₆-R₆₇-R₆₈-R₆₉-R₇₀-R₇₁-R₇₂
[0205] wherein (i) _{ZZZ} indicates any of the twenty amino acids; (ii) Formula III corresponds to humans; (iii) x=1-271 (e.g., x=1-250, x=1-225, x=1-200, x=1-175, x=1-150, x=1-125, x=1-100, x=1-75, x=1-50, x=1-40, x=1-30, x=1-29, x=1-28, x=1-27, x=1-26, x=1-25, x=1-24, x=1-23, x=1-22, x=1-21, x=1-20, x=1-19, x=1-18, x=1-17, x=1-16, x=1-15, x=1-14, x=1-13, x=1-12, x=1-11, x=1-10, x=10-271, x=20-271, x=30-271, x=40-271, x=50-271, x=60-271, x=70-271, x=80-271, x=100-271, x=125-271, x=150-271, x=175-271, x=200-271, x=225-271, x=1, x=2, x=3, x=4, x=5, x=6, x=7, x=8, x=9, x=10, x=11, x=12, x=13, x=14, x=15, x=16, x=17, x=18, x=19, x=20, x=21, x=22, x=23, x=24, x=25, x=26, x=27, x=28, x=29, x=30, x=40, x=50, x=60, x=70, x=80, x=90, x=100, x=110, x=125, x=150, x=175, x=200, x=225, x=250, or x=271); and (iv) an ASGPR binding moiety is bound to a nucleobase within one or more of R₀-R₁-R₂-R₃-R₄-R₅-R₆-R₇-Rx or (v) an ASGPR binding moiety is bound to a nucleobase within one or more of R₆₁-R₆₂-R₆₃-R₆₄-R₆₅-R₆₆-R₆₇-R₆₈-R₆₉-R₇₀-R₇₁-R₇₂.

TABLE 1

| SEQ ID NO | tRNA name | tRNA sequence |
|---|---|---|
| 1 | Ala_AGC_chr6: 28763741- | GGGGGTATAGCTCAGTGGTAGAGCGCGTG |
| | 28763812 (−) | CTTAGCATGCACGAGGTCCTGGGTTCGAT |
| | | CCCCAGTACCTCCA |
| 2 | Ala_AGC_chr6: 26687485- | GGGGAATTAGCTCAAGTGGTAGAGCGCTT |
| | 26687557 (+) | GCTTAGCACGCAAGAGGTAGTGGGATCG |
| | | ATGCCCACATTCTCCA |
| 3 | Ala_AGC_chr6: 26572092- | GGGGAATTAGCTCAAATGGTAGAGCGCTC |
| | 26572164 (−) | GCTTAGCATGCGAGAGGTAGCGGGATCG |
| | | ATGCCCGCATTCTCCA |
| 4 | Ala_AGC_chr6: 26682715- | GGGGAATTAGCTCAAGTGGTAGAGCGCTT |
| | 26682787 (+) | GCTTAGCATGCAAGAGGTAGTGGGATCGA |
| | | TGCCCACATTCTCCA |
| 5 | Ala_AGC_chr6: 26705606- | GGGGAATTAGCTCAAGCGGTAGAGCGCTT |
| | 26705678 (+) | GCTTAGCATGCAAGAGGTAGTGGGATCGA |
| | | TGCCCACATTCTCCA |
| 6 | Ala_AGC_chr6: 26673590- | GGGGAATTAGCTCAAGTGGTAGAGCGCTT |
| | 26673662 (+) | GCTTAGCATGCAAGAGGTAGTGGGATCAA |
| | | TGCCCACATTCTCCA |
| 7 | Ala_AGC_chr14: 89445442- | GGGGAATTAGCTCAAGTGGTAGAGCGCTC |
| | 89445514 (+) | GCTTAGCATGCGAGAGGTAGTGGGATCGA |
| | | TGCCCGCATTCTCCA |
| 8 | Ala_AGC_chr6: 58196623- | GGGGAATTAGCCCAAGTGGTAGAGCGCTT |
| | 58196695 (−) | GCTTAGCATGCAAGAGGTAGTGGGATCGA |
| | | TGCCCACATTCTCCA |
| 9 | Ala_AGC_chr6: 28806221- | GGGGGTGTAGCTCAGTGGTAGAGCGCGTG |
| | 28806292 (−) | CTTAGCATGCACGAGGCCCCGGGTTCAAT |
| | | CCCCGGCACCTCCA |
| 10 | Ala_AGC_chr6: 28574933- | GGGGGTGTAGCTCAGTGGTAGAGCGCGTG |
| | 28575004 (+) | CTTAGCATGTACGAGGTCCCGGGTTCAAT |
| | | CCCCGGCACCTCCA |
| 11 | Ala_AGC_chr6: 28626014- | GGGGATGTAGCTCAGTGGTAGAGCGCATG |
| | 28626085 (−) | CTTAGCATGCATGAGGTCCCGGGTTCGAT |
| | | CCCCAGCATCTCCA |
| 12 | Ala_AGC_chr6: 28678366- | GGGGGTGTAGCTCAGTGGTAGAGCGCGTG |
| | 28678437 (+) | CTTAGCATGCACGAGGCCCTGGGTTCAAT |
| | | CCCCAGCACCTCCA |
| 13 | Ala_AGC_chr6: 28779849- | GGGGGTATAGCTCAGCGGTAGAGCGCGT |
| | 28779920 (−) | GCTTAGCATGCACGAGGTCCTGGGTTCAA |
| | | TCCCCAATACCTCCA |
| 14 | Ala_AGC_chr6: 28687481- | GGGGGTGTAGCTCAGTGGTAGAGCGCGTG |
| | 28687552 (+) | CTTAGCATGCACGAGGCCCCGGGTTCAAT |
| | | CCCTGGCACCTCCA |
| 15 | Ala_AGC_chr2: 27274082- | GGGGGATTAGCTCAAATGGTAGAGCGCTC |
| | 27274154 (+) | GCTTAGCATGCGAGAGGTAGCGGGATCG |
| | | ATGCCCGCATCCTCCA |
| 16 | Ala_AGC_chr6: 26730737- | GGGGAATTAGCTCAGGCGGTAGAGCGCTC |
| | 26730809 (+) | GCTTAGCATGCGAGAGGTAGCGGGATCG |
| | | ACGCCCGCATTCTCCA |
| 17 | Ala_CGC_chr6: 26553731- | GGGGATGTAGCTCAGTGGTAGAGCGCATG |
| | 26553802 (+) | CTTCGCATGTATGAGGTCCCGGGTTCGAT |
| | | CCCCGGCATCTCCA |
| 18 | Ala_CGC_chr6: 28641613- | GGGGATGTAGCTCAGTGGTAGAGCGCATG |
| | 28641684 (−) | CTTCGCATGTATGAGGCCCCGGGTTCGAT |
| | | CCCCGGCATCTCCA |
| 19 | Ala_CGC_chr2: 157257281- | GGGGATGTAGCTCAGTGGTAGAGCGCGC |
| | 157257352 (+) | GCTTCGCATGTGTGAGGTCCCGGGTTCAA |
| | | TCCCCGGCATCTCCA |
| 20 | Ala_CGC_chr6: 28697092- | GGGGGTGTAGCTCAGTGGTAGAGCGCGTG |
| | 28697163 (+) | CTTCGCATGTACGAGGCCCCGGGTTCGAC |
| | | CCCCGGCTCCTCCA |
| 21 | Ala_TGC_chr6: 28757547- | GGGGGTGTAGCTCAGTGGTAGAGCGCATG |
| | 28757618 (−) | CTTTGCATGTATGAGGTCCCGGGTTCGAT |
| | | CCCCGGCACCTCCA |
| 22 | Ala_TGC_chr6: 28611222- | GGGGATGTAGCTCAGTGGTAGAGCGCATG |
| | 28611293 (+) | CTTTGCATGTATGAGGTCCCGGGTTCGAT |
| | | CCCCGGCATCTCCA |
| 23 | Ala_TGC_chr5: 180633868- | GGGGATGTAGCTCAGTGGTAGAGCGCATG |
| | 180633939 (+) | CTTTGCATGTATGAGGCCCCGGGTTCGAT |
| | | CCCCGGCATCTCCA |
| 24 | Ala_TGC_chr12: 125424512- | GGGGATGTAGCTCAGTGGTAGAGCGCATG |
| | 125424583 (+) | CTTTGCACGTATGAGGCCCCGGGTTCAAT |
| | | CCCCGGCATCTCCA |
| 25 | Ala_TGC_chr6: 28785012- | GGGGGTGTAGCTCAGTGGTAGAGCGCATG |
| | 28785083 (−) | CTTTGCATGTATGAGGCCTCGGGTTCGAT |
| | | CCCCGACACCTCCA |
| 26 | Ala_TGC_chr6: 28726141- | GGGGGTGTAGCTCAGTGGTAGAGCACATG |
| | 28726212 (−) | CTTTGCATGTGTGAGGCCCCGGGTTCGAT |
| | | CCCCGGCACCTCCA |
| 27 | Ala_TGC_chr6: 28770577- | GGGGGTGTAGCTCAGTGGTAGAGCGCATG |
| | 28770647 (−) | CTTTGCATGTATGAGGCCTCGGTTCGATC |
| | | CCCGACACCTCCA |
| 28 | Arg_ACG_chr6: 26328368- | GGGCCAGTGGCGCAATGGATAACGCGTCT |
| | 26328440 (+) | GACTACGGATCAGAAGATTCCAGGTTCGA |
| | | CTCCTGGCTGGCTCG |
| 29 | Arg_ACG_chr3: 45730491- | GGGCCAGTGGCGCAATGGATAACGCGTCT |
| | 45730563 (−) | GACTACGGATCAGAAGATTCTAGGTTCGA |
| | | CTCCTGGCTGGCTCG |
| 30 | Arg_CCG_chr6: 28710729- | GGCCGCGTGGCCTAATGGATAAGGCGTCT |
| | 28710801 (−) | GATTCCGGATCAGAAGATTGAGGGTTCGA |
| | | GTCCCTTCGTGGTCG |
| 31 | Arg_CCG_chr17: 66016013- | GACCCAGTGGCCTAATGGATAAGGCATCA |
| | 66016085 (−) | GCCTCCGGAGCTGGGGATTGTGGGTTCGA |
| | | GTCCCATCTGGGTCG |
| 32 | Arg_CCT_chr17: 73030001- | GCCCCAGTGGCCTAATGGATAAGGCACTG |
| | 73030073 (+) | GCCTCCTAAGCCAGGGATTGTGGGTTCGA |
| | | GTCCCACCTGGGGTA |
| 33 | Arg_CCT_chr17: 73030526- | GCCCCAGTGGCCTAATGGATAAGGCACTG |
| | 73030598 (−) | GCCTCCTAAGCCAGGGATTGTGGGTTCGA |
| | | GTCCCACCTGGGGTG |
| 34 | Arg_CCT_chr16: 3202901- | GCCCCGGTGGCCTAATGGATAAGGCATTG |
| | 3202973 (+) | GCCTCCTAAGCCAGGGATTGTGGGTTCGA |
| | | GTCCCACCCGGGGTA |
| 35 | Arg_CCT_chr7: 139025446- | GCCCCAGTGGCCTAATGGATAAGGCATTG |
| | 139025518 (+) | GCCTCCTAAGCCAGGGATTGTGGGTTCGA |
| | | GTCCCATCTGGGGTG |
| 36 | Arg_CCT_chr16: 3243918- | GCCCCAGTGGCCTGATGGATAAGGTACTG |
| | 3243990 (+) | GCCTCCTAAGCCAGGGATTGTGGGTTCGA |
| | | GTTCCACCTGGGGTA |
| 37 | Arg_TCG_chr15: 89878304- | GGCCGCGTGGCCTAATGGATAAGGCGTCT |
| | 89878376 (+) | GACTTCGGATCAGAAGATTGCAGGTTCGA |
| | | GTCCTGCCGCGGTCG |
| 38 | Arg_TCG_chr6: 26323046- | GACCACGTGGCCTAATGGATAAGGCGTCT |
| | 26323118 (+) | GACTTCGGATCAGAAGATTGAGGGTTCGA |
| | | ATCCCTCCGTGGTTA |
| 39 | Arg_TCG_chr17: 73031208- | GACCGCGTGGCCTAATGGATAAGGCGTCT |
| | 73031280 (+) | GACTTCGGATCAGAAGATTGAGGGTTCGA |
| | | GTCCCTTCGTGGTCG |
| 40 | Arg_TCG_chr6: 26299905- | GACCACGTGGCCTAATGGATAAGGCGTCT |
| | 26299977 (+) | GACTTCGGATCAGAAGATTGAGGGTTCGA |
| | | ATCCCTTCGTGGTTA |
| 41 | Arg_TCG_chr6: 28510891- | GACCACGTGGCCTAATGGATAAGGCGTCT |
| | 28510963 (−) | GACTTCGGATCAGAAGATTGAGGGTTCGA |
| | | ATCCCTTCGTGGTTG |
| 42 | Arg_TCG_chr9: 112960803- | GGCCGTGTGGCCTAATGGATAAGGCGTCT |
| | 112960875 (+) | GACTTCGGATCAAAAGATTGCAGGTTTGA |
| | | GTTCTGCCACGGTCG |
| 43 | Arg_TCT_chr1: 94313129- | GGCTCCGTGGCGCAATGGATAGCGCATTG |
| | 94313213 (+) | GACTTCTAGAGGCTGAAGGCATTCAAAGG |
| | | TTCCGGGTTCGAGTCCCGGCGGAGTCG |
| 44 | Arg_TCT_chr17: 8024243- | GGCTCTGTGGCGCAATGGATAGCGCATTG |
| | 8024330 (+) | GACTTCTAGTGACGAATAGAGCAATTCAA |
| | | AGGTTGTGGGTTCGAATCCCACCAGAGTC |
| | | G |
| 45 | Arg_TCT_chr9: 131102355- | GGCTCTGTGGCGCAATGGATAGCGCATTG |
| | 131102445 (−) | GACTTCTAGCTGAGCCTAGTGTGGTCATT |
| | | CAAAGGTTGTGGGTTCGAGTCCCACCAGA |
| | | GTCG |
| 46 | Arg_TCT_chr11: 59318767- | GGCTCTGTGGCGCAATGGATAGCGCATTG |
| | 59318852 (+) | GACTTCTAGATAGTTAGAGAAATTCAAAG |
| | | GTTGTGGGTTCGAGTCCCACCAGAGTCG |
| 47 | Arg_TCT_chr1: 159111401- | GTCTCTGTGGCGCAATGGACGAGCGCGCT |
| | 159111474 (−) | GGACTTCTAATCCAGAGGTTCCGGGTTCG |
| | | AGTCCCGGCAGAGATG |
| 48 | Arg_TCT_chr6: 27529963- | GGCTCTGTGGCGCAATGGATAGCGCATTG |
| | 27530049 (+) | GACTTCTAGCCTAAATCAAGAGATTCAAA |
| | | GGTTGCGGGTTCGAGTCCCTCCAGAGTCG |
| 49 | Asn_GTT_chr1: 161510031- | GTCTCTGTGGCGCAATCGGTTAGCGCGTT |
| | 161510104 (+) | CGGCTGTTAACCGAAAGGTTGGTGGTTCG |
| | | ATCCCACCCAGGGACG |
| 50 | Asn_GTT_chr1: 143879832- | GTCTCTGTGGCGCAATCGGCTAGCGCGTT |
| | 143879905 (−) | TGGCTGTTAACTAAAAGGTTGGCGGTTCG |
| | | AACCCACCCAGAGGCG |
| 51 | Asn_GTT_chr1: 144301611- | GTCTCTGTGGTGCAATCGGTTAGCGCGTT |
| | 144301684 (+) | CCGCTGTTAACCGAAAGCTTGGTGGTTCG |
| | | AGCCCACCCAGGGATG |
| 52 | Asn_GTT_chr1: 149326272- | GTCTCTGTGGCGCAATCGGCTAGCGCGTT |
| | 149326345 (−) | TGGCTGTTAACTAAAAAGTTGGTGGTTCG |
| | | AACACACCCAGAGGCG |
| 53 | Asn_GTT_chr1: 148248115- | GTCTCTGTGGCGCAATCGGTTAGCGCGTT |
| | 148248188 (+) | CGGCTGTTAACCGAAAGGTTGGTGGTTCG |
| | | AGCCCACCCAGGGACG |
| 54 | Asn_GTT_chr1: 148598314- | GTCTCTGTGGCGCAATCGGTTAGCGCATT |
| | 148598387 (−) | CGGCTGTTAACCGAAAGGTTGGTGGTTCG |
| | | AGCCCACCCAGGGACG |
| 55 | Asn_GTT_chr1: 17216172- | GTCTCTGTGGCGCAATCGGTTAGCGCGTT |
| | 17216245 (+) | CGGCTGTTAACCGAAAGATTGGTGGTTCG |
| | | AGCCCACCCAGGGACG |
| 56 | Asn_GTT_chr1: 16847080- | GTCTCTGTGGCGCAATCGGTTAGCGCGTT |
| | 16847153 (−) | CGGCTGTTAACTGAAAGGTTGGTGGTTCG |
| | | AGCCCACCCAGGGACG |
| 57 | Asn_GTT_chr1: 149230570- | GTCTCTGTGGCGCAATGGGTTAGCGCGTT |
| | 149230643 (−) | CGGCTGTTAACCGAAAGGTTGGTGGTTCG |
| | | AGCCCATCCAGGGACG |
| 58 | Asn_GTT_chr1: 148000805- | GTCTCTGTGGCGTAGTCGGTTAGCGCGTT |
| | 148000878 (+) | CGGCTGTTAACCGAAAAGTTGGTGGTTCG |
| | | AGCCCACCCAGGAACG |
| 59 | Asn_GTT_chr1: 149711798- | GTCTCTGTGGCGCAATCGGCTAGCGCGTT |
| | 149711871 (−) | TGGCTGTTAACTAAAAGGTTGGTGGTTCG |
| | | AACCCACCCAGAGGCG |
| 60 | Asn_GTT_chr1: 145979034- | GTCTCTGTGGCGCAATCGGTTAGCGCGTT |
| | 145979107 (−) | CGGCTGTTAACTGAAAGGTTAGTGGTTCG |
| | | AGCCCACCCGGGGACG |
| 61 | Asp_GTC_chr12: 98897281- | TCCTCGTTAGTATAGTGGTTAGTATCCCCG |
| | 98897352 (+) | CCTGTCACGCGGGAGACCGGGGTTCAATT |
| | | CCCCGACGGGGAG |
| 62 | Asp_GTC_chr1: 161410615- | TCCTCGTTAGTATAGTGGTGAGTATCCCC |
| | 161410686 (−) | GCCTGTCACGCGGGAGACCGGGGTTCGAT |
| | | TCCCCGACGGGGAG |
| 63 | Asp_GTC_chr6: 27551236- | TCCTCGTTAGTATAGTGGTGAGTGTCCCC |
| | 27551307 (−) | GTCTGTCACGCGGGAGACCGGGGTTCGAT |
| | | TCCCCGACGGGGAG |
| 64 | Cys_GCA_chr7: 149007281- | GGGGGCATAGCTCAGTGGTAGAGCATTTG |
| | 149007352 (+) | ACTGCAGATCAAGAGGTCCCTGGTTCAAA |
| | | TCCAGGTGCCCCCT |
| 65 | Cys_GCA_chr7: 149074601- | GGGGGTATAGCTCAGGGGTAGAGCATTTG |
| | 149074672 (−) | ACTGCAGATCAAGAGGTCCCTGGTTCAAA |
| | | TCCAGGTGCCCCCC |
| 66 | Cys_GCA_chr7: 149112229- | GGGGGTATAGCTTAGCGGTAGAGCATTTG |
| | 149112300 (−) | ACTGCAGATCAAGAGGTCCCCGGTTCAAA |
| | | TCCGGGTGCCCCCT |
| 67 | Cys_GCA_chr7: 149344046- | GGGGGTATAGCTTAGGGGTAGAGCATTTG |
| | 149344117 (−) | ACTGCAGATCAAAAGGTCCCTGGTTCAAA |
| | | TCCAGGTGCCCCTT |
| 68 | Cys_GCA_chr7: 149052766- | GGGGGTATAGCTCAGGGGTAGAGCATTTG |
| | 149052837 (−) | ACTGCAGATCAAGAGGTCCCCAGTTCAAA |
| | | TCTGGGTGCCCCCT |
| 69 | Cys_GCA_chr17: 37017937- | GGGGGTATAGCTCAGGGGTAGAGCATTTG |
| | 37018008 (−) | ACTGCAGATCAAGAAGTCCCCGGTTCAAA |
| | | TCCGGGTGCCCCCT |
| 70 | Cys_GCA_chr7: 149281816- | GGGGGTATAGCTCAGGGGTAGAGCATTTG |
| | 149281887 (+) | ACTGCAGATCAAGAGGTCTCTGGTTCAAA |
| | | TCCAGGTGCCCCCT |
| 71 | Cys_GCA_chr7: 149243631- | GGGGGTATAGCTCAGGGGTAGAGCACTTG |
| | 149243702 (+) | ACTGCAGATCAAGAAGTCCTTGGTTCAAA |
| | | TCCAGGTGCCCCCT |
| 72 | Cys_GCA_chr7: 149388272- | GGGGATATAGCTCAGGGGTAGAGCATTTG |
| | 149388343 (−) | ACTGCAGATCAAGAGGTCCCCGGTTCAAA |
| | | TCCGGGTGCCCCCC |
| 73 | Cys_GCA_chr7: 149072850- | GGGGGTATAGTTCAGGGGTAGAGCATTTG |
| | 149072921 (−) | ACTGCAGATCAAGAGGTCCCTGGTTCAAA |
| | | TCCAGGTGCCCCCT |
| 74 | Cys_GCA_chr7: 149310156- | GGGGGTATAGCTCAGGGGTAGAGCATTTG |
| | 149310227 (−) | ACTGCAAATCAAGAGGTCCCTGATTCAAA |
| | | TCCAGGTGCCCCCT |
| 75 | Cys_GCA_chr4: 124430005- | GGGGGTATAGCTCAGTGGTAGAGCATTTG |
| | 124430076 (−) | ACTGCAGATCAAGAGGTCCCCGGTTCAAA |
| | | TCCGGGTGCCCCCT |
| 76 | Cys_GCA_chr7: 149295046- | GGGCGTATAGCTCAGGGGTAGAGCATTTG |
| | 149295117 (+) | ACTGCAGATCAAGAGGTCCCCAGTTCAAA |
| | | TCTGGGTGCCCCCT |
| 77 | Cys_GCA_chr7: 149361915- | GGGGGTATAGCTCACAGGTAGAGCATTTG |
| | 149361986 (+) | ACTGCAGATCAAGAGGTCCCCGGTTCAAA |
| | | TCTGGGTGCCCCCT |
| 78 | Cys_GCA_chr7: 149253802- | GGGCGTATAGCTCAGGGGTAGAGCATTTG |
| | 149253871 (+) | ACTGCAGATCAAGAGGTCCCCAGTTCAAA |
| | | TCTGGGTGCCCA |
| 79 | Cys_GCA_chr7: 149292305- | GGGGGTATAGCTCACAGGTAGAGCATTTG |
| | 149292376 (−) | ACTGCAGATCAAGAGGTCCCCGGTTCAAA |
| | | TCCGGTTACTCCCT |
| 80 | Cys_GCA_chr7: 149286164- | GGGGGTATAGCTCAGGGGTAGAGCACTTG |
| | 149286235 (−) | ACTGCAGATCAAGAGGTCCCTGGTTCAAA |
| | | TCCAGGTGCCCCCT |
| 81 | Cys_GCA_chr17: 37025545- | GGGGGTATAGCTCAGTGGTAGAGCATTTG |
| | 37025616 (−) | ACTGCAGATCAAGAGGTCCCTGGTTCAAA |
| | | TCCGGGTGCCCCCT |
| 82 | Cys_GCA_chr15: 80036997- | GGGGGTATAGCTCAGTGGGTAGAGCATTT |
| | 80037069 (+) | GACTGCAGATCAAGAGGTCCCCGGTTCAA |
| | | ATCCGGGTGCCCCCT |
| 83 | Cys_GCA_chr3: 131947944- | GGGGGTGTAGCTCAGTGGTAGAGCATTTG |
| | 131948015 (−) | ACTGCAGATCAAGAGGTCCCTGGTTCAAA |
| | | TCCAGGTGCCCCCT |
| 84 | Cys_GCA_chr1: 93981834- | GGGGGTATAGCTCAGGTGGTAGAGCATTT |
| | 93981906 (−) | GACTGCAGATCAAGAGGTCCCCGGTTCAA |
| | | ATCCGGGTGCCCCCT |
| 85 | Cys_GCA_chr14: 73429679- | GGGGGTATAGCTCAGGGGTAGAGCATTTG |
| | 73429750 (+) | ACTGCAGATCAAGAGGTCCCCGGTTCAAA |
| | | TCCGGGTGCCCCCT |
| 86 | Cys_GCA_chr3: 131950642- | GGGGGTATAGCTCAGGGGTAGAGCATTTG |
| | 131950713 (−) | ACTGCAGATCAAGAGGTCCCTGGTTCAAA |
| | | TCCAGGTGCCCCCT |
| 87 | Gln_CTG_chr6: 18836402- | GGTTCCATGGTGTAATGGTTAGCACTCTG |
| | 18836473 (+) | GACTCTGAATCCAGCGATCCGAGTTCAAA |
| | | TCTCGGTGGAACCT |
| 88 | Gln_CTG_chr6: 27515531- | GGTTCCATGGTGTAATGGTTAGCACTCTG |
| | 27515602 (−) | GACTCTGAATCCAGCGATCCGAGTTCAAG |
| | | TCTCGGTGGAACCT |
| 89 | Gln_CTG_chr1: 145963304- | GGTTCCATGGTGTAATGGTGAGCACTCTG |
| | 145963375 (+) | GACTCTGAATCCAGCGATCCGAGTTCGAG |
| | | TCTCGGTGGAACCT |
| 90 | Gln_CTG_chr1: 147737382- | GGTTCCATGGTGTAATGGTAAGCACTCTG |
| | 147737453 (−) | GACTCTGAATCCAGCGATCCGAGTTCGAG |
| | | TCTCGGTGGAACCT |
| 91 | Gln_CTG_chr6: 27263212- | GGTTCCATGGTGTAATGGTTAGCACTCTG |
| | 27263283 (+) | GACTCTGAATCCGGTAATCCGAGTTCAAA |
| | | TCTCGGTGGAACCT |
| 92 | Gln_CTG_chr6: 27759135- | GGCCCCATGGTGTAATGGTCAGCACTCTG |
| | 27759206 (−) | GACTCTGAATCCAGCGATCCGAGTTCAAA |
| | | TCTCGGTGGGACCC |
| 93 | Gln_CTG_chr1: 147800937- | GGTTCCATGGTGTAATGGTAAGCACTCTG |
| | 147801008 (+) | GACTCTGAATCCAGCCATCTGAGTTCGAG |
| | | TCTCTGTGGAACCT |
| 94 | Gln_TTG_chr17: 47269890- | GGTCCCATGGTGTAATGGTTAGCACTCTG |
| | 47269961 (+) | GACTTTGAATCCAGCGATCCGAGTTCAAA |
| | | TCTCGGTGGGACCT |
| 95 | Gln_TTG_chr6: 28557156- | GGTCCCATGGTGTAATGGTTAGCACTCTG |
| | 28557227 (+) | GACTTTGAATCCAGCAATCCGAGTTCGAA |
| | | TCTCGGTGGGACCT |
| 96 | Gln_TTG_chr6: 26311424- | GGCCCCATGGTGTAATGGTTAGCACTCTG |
| | 26311495 (−) | GACTTTGAATCCAGCGATCCGAGTTCAAA |
| | | TCTCGGTGGGACCT |
| 97 | Gln_TTG_chr6: 145503859- | GGTCCCATGGTGTAATGGTTAGCACTCTG |
| | 145503930 (+) | GGCTTTGAATCCAGCAATCCGAGTTCGAA |
| | | TCTTGGTGGGACCT |
| 98 | Glu_CTC_chr1: 145399233- | TCCCTGGTGGTCTAGTGGTTAGGATTCGG |
| | 145399304 (−) | CGCTCTCACCGCCGCGGCCCGGGTTCGAT |
| | | TCCCGGTCAGGGAA |
| 99 | Glu_CTC_chr1: 249168447- | TCCCTGGTGGTCTAGTGGTTAGGATTCGG |
| | 249168518 (+) | CGCTCTCACCGCCGCGGCCCGGGTTCGAT |
| | | TCCCGGTCAGGAAA |
| 100 | Glu_TTC_chr2: 131094701- | TCCCATATGGTCTAGCGGTTAGGATTCCT |
| | 131094772 (−) | GGTTTTCACCCAGGTGGCCCGGGTTCGAC |
| | | TCCCGGTATGGGAA |
| 101 | Glu_TTC_chr13: 45492062- | TCCCACATGGTCTAGCGGTTAGGATTCCT |
| | 45492133 (−) | GGTTTTCACCCAGGCGGCCCGGGTTCGAC |
| | | TCCCGGTGTGGGAA |
| 102 | Glu_TTC_chr1: 17199078- | TCCCTGGTGGTCTAGTGGCTAGGATTCGG |
| | 17199149 (+) | CGCTTTCACCGCCGCGGCCCGGGTTCGAT |
| | | TCCCGGCCAGGGAA |
| 103 | Glu_TTC_chr1: 16861774- | TCCCTGGTGGTCTAGTGGCTAGGATTCGG |
| | 16861845 (−) | CGCTTTCACCGCCGCGGCCCGGGTTCGAT |
| | | TCCCGGTCAGGGAA |
| 104 | Gly_CCC_chr1: 16872434- | GCATTGGTGGTTCAGTGGTAGAATTCTCG |
| | 16872504 (−) | CCTCCCACGCGGGAGACCCGGGTTCAATT |
| | | CCCGGCCAATGCA |
| 105 | Gly_CCC_chr2: 70476123- | GCGCCGCTGGTGTAGTGGTATCATGCAAG |
| | 70476193 (−) | ATTCCCATTCTTGCGACCCGGGTTCGATTC |
| | | CCGGGCGGCGCA |
| 106 | Gly_CCC_chr17: 19764175- | GCATTGGTGGTTCAATGGTAGAATTCTCG |
| | 19764245 (+) | CCTCCCACGCAGGAGACCCAGGTTCGATT |
| | | CCTGGCCAATGCA |
| 107 | Gly_GCC_chr1: 161413094- | GCATGGGTGGTTCAGTGGTAGAATTCTCG |
| | 161413164 (+) | CCTGCCACGCGGGAGGCCCGGGTTCGATT |
| | | CCCGGCCCATGCA |
| 108 | Gly_GCC_chr1: 161493637- | GCATTGGTGGTTCAGTGGTAGAATTCTCG |
| | 161493707 (−) | CCTGCCACGCGGGAGGCCCGGGTTCGATT |
| | | CCCGGCCAATGCA |
| 109 | Gly_GCC_chr16: 70812114- | GCATTGGTGGTTCAGTGGTAGAATTCTCG |
| | 70812184 (−) | CCTGCCACGCGGGAGGCCCGGGTTTGATT |
| | | CCCGGCCAGTGCA |
| 110 | Gly_GCC_chr1: 161450356- | GCATAGGTGGTTCAGTGGTAGAATTCTTG |
| | 161450426 (+) | CCTGCCACGCAGGAGGCCCAGGTTTGATT |
| | | CCTGGCCCATGCA |
| 111 | Gly_GCC_chr16: 70822597- | GCATTGGTGGTTCAGTGGTAGAATTCTCG |
| | 70822667 (+) | CCTGCCATGCGGGCGGCCGGGCTTCGATT |
| | | CCTGGCCAATGCA |
| 112 | Gly_TCC_chr19: 4724082- | GCGTTGGTGGTATAGTGGTTAGCATAGCT |
| | 4724153 (+) | GCCTTCCAAGCAGTTGACCCGGGTTCGAT |
| | | TCCCGGCCAACGCA |
| 113 | Gly_TCC_chr1: 145397864- | GCGTTGGTGGTATAGTGGTGAGCATAGCT |
| | 145397935 (−) | GCCTTCCAAGCAGTTGACCCGGGTTCGAT |
| | | TCCCGGCCAACGCA |
| 114 | Gly_TCC_chr17: 8124866- | GCGTTGGTGGTATAGTGGTAAGCATAGCT |
| | 8124937 (+) | GCCTTCCAAGCAGTTGACCCGGGTTCGAT |
| | | TCCCGGCCAACGCA |
| 115 | Gly_TCC_chr1: 161409961- | GCGTTGGTGGTATAGTGGTGAGCATAGTT |
| | 161410032 (−) | GCCTTCCAAGCAGTTGACCCGGGCTCGAT |
| | | TCCCGCCCAACGCA |
| 116 | His_GTG_chr1: 145396881- | GCCGTGATCGTATAGTGGTTAGTACTCTG |
| | 145396952 (−) | CGTTGTGGCCGCAGCAACCTCGGTTCGAA |
| | | TCCGAGTCACGGCA |
| 117 | His_GTG_chr1: 149155828- | GCCATGATCGTATAGTGGTTAGTACTCTG |
| | 149155899 (−) | CGCTGTGGCCGCAGCAACCTCGGTTCGAA |
| | | TCCGAGTCACGGCA |
| 118 | Ile_AAT_chr6: 58149254- | GGCCGGTTAGCTCAGTTGGTTAGAGCGTG |
| | 58149327 (+) | GCGCTAATAACGCCAAGGTCGCGGGTTCG |
| | | ATCCCCGTACGGGCCA |
| 119 | Ile_AAT_chr6: 27655967- | GGCCGGTTAGCTCAGTTGGTTAGAGCGTG |
| | 27656040 (+) | GTGCTAATAACGCCAAGGTCGCGGGTTCG |
| | | ATCCCCGTACTGGCCA |
| 120 | Ile_AAT_chr6: 27242990- | GGCTGGTTAGCTCAGTTGGTTAGAGCGTG |
| | 27243063 (−) | GTGCTAATAACGCCAAGGTCGCGGGTTCG |
| | | ATCCCCGTACTGGCCA |
| 121 | Ile_AAT_chr17: 8130309- | GGCCGGTTAGCTCAGTTGGTTAGAGCGTG |
| | 8130382 (−) | GTGCTAATAACGCCAAGGTCGCGGGTTCG |
| | | AACCCCGTACGGGCCA |
| 122 | Ile_AAT_chr6: 26554350- | GGCCGGTTAGCTCAGTTGGTTAGAGCGTG |
| | 26554423 (+) | GTGCTAATAACGCCAAGGTCGCGGGTTCG |
| | | ATCCCCGTACGGGCCA |
| 123 | Ile_AAT_chr6: 26745255- | GGCCGGTTAGCTCAGTTGGTTAGAGCGTG |
| | 26745328 (−) | GTGCTAATAACGCTAAGGTCGCGGGTTCG |
| | | ATCCCCGTACTGGCCA |
| 124 | Ile_AAT_chr6: 26721221- | GGCCGGTTAGCTCAGTTGGTCAGAGCGTG |
| | 26721294 (−) | GTGCTAATAACGCCAAGGTCGCGGGTTCG |
| | | ATCCCCGTACGGGCCA |
| 125 | lle_AAT_chr6: 27636362- | GGCCGGTTAGCTCAGTCGGCTAGAGCGTG |
| | 27636435 (+) | GTGCTAATAACGCCAAGGTCGCGGGTTCG |
| | | ATCCCCGTACGGGCCA |
| 126 | Ile_AAT_chr6: 27241739- | GGCTGGTTAGTTCAGTTGGTTAGAGCGTG |
| | 27241812 (+) | GTGCTAATAACGCCAAGGTCGTGGGTTCG |
| | | ATCCCCATATCGGCCA |
| 127 | Ile_GAT_chrX: 3756418- | GGCCGGTTAGCTCAGTTGGTAAGAGCGTG |
| | 3756491 (−) | GTGCTGATAACACCAAGGTCGCGGGCTCG |
| | | ACTCCCGCACCGGCCA |
| 128 | Ilc_TAT_chr19: 39902808- | GCTCCAGTGGCGCAATCGGTTAGCGCGCG |
| | 39902900 (−) | GTACTTATATGACAGTGCGAGCGGAGCAA |
| | | TGCCGAGGTTGTGAGTTCGATCCTCACCT |
| | | GGAGCA |
| 129 | Ile_TAT_chr2: 43037676- | GCTCCAGTGGCGCAATCGGTTAGCGCGCG |
| | 43037768 (+) | GTACTTATACAGCAGTACATGCAGAGCAA |
| | | TGCCGAGGTTGTGAGTTCGAGCCTCACCT |
| | | GGAGCA |
| 130 | Ile_TAT_chr6: 26988125- | GCTCCAGTGGCGCAATCGGTTAGCGCGCG |
| | 26988218 (+) | GTACTTATATGGCAGTATGTGTGCGAGTG |
| | | ATGCCGAGGTTGTGAGTTCGAGCCTCACC |
| | | TGGAGCA |
| 131 | Ile_TAT_chr6: 27599200- | GCTCCAGTGGCGCAATCGGTTAGCGCGCG |
| | 27599293 (+) | GTACTTATACAACAGTATATGTGCGGGTG |
| | | ATGCCGAGGTTGTGAGTTCGAGCCTCACC |
| | | TGGAGCA |
| 132 | Ile_TAT_chr6: 28505367- | GCTCCAGTGGCGCAATCGGTTAGCGCGCG |
| | 28505460 (+) | GTACTTATAAGACAGTGCACCTGTGAGCA |
| | | ATGCCGAGGTTGTGAGTTCAAGCCTCACC |
| | | TGGAGCA |
| 133 | Leu_AAG_chr5: 180524474- | GGTAGCGTGGCCGAGCGGTCTAAGGCGCT |
| | 180524555 (−) | GGATTAAGGCTCCAGTCTCTTCGGAGGCG |
| | | TGGGTTCGAATCCCACCGCTGCCA |
| 134 | Leu_AAG_chr5: 180614701- | GGTAGCGTGGCCGAGCGGTCTAAGGCGCT |
| | 180614782 (+) | GGATTAAGGCTCCAGTCTCTTCGGGGGCG |
| | | TGGGTTCGAATCCCACCGCTGCCA |
| 135 | Leu_AAG_chr6: 28956779- | GGTAGCGTGGCCGAGCGGTCTAAGGCGCT |
| | 28956860 (+) | GGATTAAGGCTCCAGTCTCTTCGGGGGCG |
| | | TGGGTTCAAATCCCACCGCTGCCA |
| 136 | Leu_AAG_chr6: 28446400- | GGTAGCGTGGCCGAGTGGTCTAAGACGCT |
| | 28446481 (−) | GGATTAAGGCTCCAGTCTCTTCGGGGGCG |
| | | TGGGTTTGAATCCCACCGCTGCCA |
| 137 | Leu_CAA_chr6: 28864000- | GTCAGGATGGCCGAGTGGTCTAAGGCGCC |
| | 28864105 (−) | AGACTCAAGCTAAGCTTCCTCCGCGGTGG |
| | | GGATTCTGGTCTCCAATGGAGGCGTGGGT |
| | | TCGAATCCCACTTCTGACA |
| 138 | Leu_CAA_chr6: 28908830- | GTCAGGATGGCCGAGTGGTCTAAGGCGCC |
| | 28908934 (+) | AGACTCAAGCTTGGCTTCCTCGTGTTGAG |
| | | GATTCTGGTCTCCAATGGAGGCGTGGGTT |
| | | CGAATCCCACTTCTGACA |
| 139 | Leu_CAA_chr6: 27573417- | GTCAGGATGGCCGAGTGGTCTAAGGCGCC |
| | 27573524 (−) | AGACTCAAGCTTACTGCTTCCTGTGTTCG |
| | | GGTCTTCTGGTCTCCGTATGGAGGCGTGG |
| | | GTTCGAATCCCACTTCTGACA |
| 140 | Leu_CAA_chr6: 27570348- | GTCAGGATGGCCGAGTGGTCTAAGGCGCC |
| | 27570454 (−) | AGACTCAAGTTGCTACTTCCCAGGTTTGG |
| | | GGCTTCTGGTCTCCGCATGGAGGCGTGGG |
| | | TTCGAATCCCACTTCTGACA |
| 141 | Leu_CAA_chr1: 249168054- | GTCAGGATGGCCGAGTGGTCTAAGGCGCC |
| | 249168159 (+) | AGACTCAAGGTAAGCACCTTGCCTGCGGG |
| | | CTTTCTGGTCTCCGGATGGAGGCGTGGGT |
| | | TCGAATCCCACTTCTGACA |
| 142 | Leu_CAA_chr11: 9296790- | GCCTCCTTAGTGCAGTAGGTAGCGCATCA |
| | 9296863 (+) | GTCTCAAAATCTGAATGGTCCTGAGTTCA |
| | | AGCCTCAGAGGGGGCA |
| 143 | Leu_CAA_chr1: 161581736- | GTCAGGATGGCCGAGCAGTCTTAAGGCGC |
| | 161581819 (−) | TGCGTTCAAATCGCACCCTCCGCTGGAGG |
| | | CGTGGGTTCGAATCCCACTTTTGACA |
| 144 | Leu_CAG_chr1: 161411323- | GTCAGGATGGCCGAGCGGTCTAAGGCGCT |
| | 161411405 (+) | GCGTTCAGGTCGCAGTCTCCCCTGGAGGC |
| | | GTGGGTTCGAATCCCACTCCTGACA |
| 145 | Leu_CAG_chr16: 57333863- | GTCAGGATGGCCGAGCGGTCTAAGGCGCT |
| | 57333945 (+) | GCGTTCAGGTCGCAGTCTCCCCTGGAGGC |
| | | GTGGGTTCGAATCCCACTTCTGACA |
| 146 | Leu_TAA_chr6: 144537684- | ACCAGGATGGCCGAGTGGTTAAGGCGTTG |
| | 144537766 (+) | GACTTAAGATCCAATGGACATATGTCCGC |
| | | GTGGGTTCGAACCCCACTCCTGGTA |
| 147 | Leu_TAA_chr6: 27688898- | ACCGGGATGGCCGAGTGGTTAAGGCGTTG |
| | 27688980 (−) | GACTTAAGATCCAATGGGCTGGTGCCCGC |
| | | GTGGGTTCGAACCCCACTCTCGGTA |
| 148 | Leu_TAA_chr11: 59319228- | ACCAGAATGGCCGAGTGGTTAAGGCGTTG |
| | 59319310 (+) | GACTTAAGATCCAATGGATTCATATCCGC |
| | | GTGGGTTCGAACCCCACTTCTGGTA |
| 149 | Leu_TAA_chr6: 27198334- | ACCGGGATGGCTGAGTGGTTAAGGCGTTG |
| | 27198416 (−) | GACTTAAGATCCAATGGACAGGTGTCCGC |
| | | GTGGGTTCGAGCCCCACTCCCGGTA |
| 150 | Leu_TAG_chr17: 8023632- | GGTAGCGTGGCCGAGCGGTCTAAGGCGCT |
| | 8023713 (−) | GGATTTAGGCTCCAGTCTCTTCGGAGGCG |
| | | TGGGTTCGAATCCCACCGCTGCCA |
| 151 | Leu_TAG_chr14: 21093529- | GGTAGTGTGGCCGAGCGGTCTAAGGCGCT |
| | 21093610 (+) | GGATTTAGGCTCCAGTCTCTTCGGGGGCG |
| | | TGGGTTCGAATCCCACCACTGCCA |
| 152 | Leu_TAG_chr16: 22207032- | GGTAGCGTGGCCGAGTGGTCTAAGGCGCT |
| | 22207113 (−) | GGATTTAGGCTCCAGTCATTTCGATGGCG |
| | | TGGGTTCGAATCCCACCGCTGCCA |
| 153 | Lys_CTT_chr14: 58706613- | GCCCGGCTAGCTCAGTCGGTAGAGCATGG |
| | 58706685 (−) | GACTCTTAATCCCAGGGTCGTGGGTTCGA |
| | | GCCCCACGTTGGGCG |
| 154 | Lys_CTT_chr19: 36066750- | GCCCAGCTAGCTCAGTCGGTAGAGCATAA |
| | 36066822 (+) | GACTCTTAATCTCAGGGTTGTGGATTCGT |
| | | GCCCCATGCTGGGTG |
| 155 | Lys_CTT_chr19: 52425393- | GCAGCTAGCTCAGTCGGTAGAGCATGAGA |
| | 52425466 (−) | CTCTTAATCTCAGGGTCATGGGTTCGTGC |
| | | CCCATGTTGGGTGCCA |
| 156 | Lys_CTT_chr1: 145395522- | GCCCGGCTAGCTCAGTCGGTAGAGCATGA |
| | 145395594 (−) | GACTCTTAATCTCAGGGTCGTGGGTTCGA |
| | | GCCCCACGTTGGGCG |
| 157 | Lys_CTT_chr16: 3207406- | GCCCGGCTAGCTCAGTCGGTAGAGCATGA |
| | 3207478 (−) | GACCCTTAATCTCAGGGTCGTGGGTTCGA |
| | | GCCCCACGTTGGGCG |
| 158 | Lys_CTT_chr16: 3241501- | GCCCGGCTAGCTCAGTCGGTAGAGCATGG |
| | 3241573 (+) | GACTCTTAATCTCAGGGTCGTGGGTTCGA |
| | | GCCCCACGTTGGGCG |
| 159 | Lys_CTT_chr16: 3230555- | GCCCGGCTAGCTCAGTCGATAGAGCATGA |
| | 3230627 (−) | GACTCTTAATCTCAGGGTCGTGGGTTCGA |
| | | GCCGCACGTTGGGCG |
| 160 | Lys_CTT_chr1: 55423542- | GCCCAGCTAGCTCAGTCGGTAGAGCATGA |
| | 55423614 (−) | GACTCTTAATCTCAGGGTCATGGGTTTGA |
| | | GCCCCACGTTTGGTG |
| 161 | Lys_CTT_chr16: 3214939- | GCCTGGCTAGCTCAGTCGGCAAAGCATGA |
| | 3215011 (+) | GACTCTTAATCTCAGGGTCGTGGGCTCGA |
| | | GCTCCATGTTGGGCG |
| 162 | Lys_CTT_chr5: 26198539- | GCCCGACTACCTCAGTCGGTGGAGCATGG |
| | 26198611 (−) | GACTCTTCATCCCAGGGTTGTGGGTTCGA |
| | | GCCCCACATTGGGCA |
| 163 | Lys_TTT_chr16: 73512216- | GCCTGGATAGCTCAGTTGGTAGAGCATCA |
| | 73512288 (−) | GACTTTTAATCTGAGGGTCCAGGGTTCAA |
| | | GTCCCTGTTCAGGCA |
| 164 | Lys_TTT_chr12: 27843306- | ACCCAGATAGCTCAGTCAGTAGAGCATCA |
| | 27843378 (+) | GACTTTTAATCTGAGGGTCCAAGGTTCAT |
| | | GTCCCTTTTTGGGTG |
| 165 | Lys_TTT_chr11: 122430655- | GCCTGGATAGCTCAGTTGGTAGAGCATCA |
| | 122430727 (+) | GACTTTTAATCTGAGGGTCCAGGGTTCAA |
| | | GTCCCTGTTCAGGCG |
| 166 | Lys_TTT_chr1: 204475655- | GCCCGGATAGCTCAGTCGGTAGAGCATCA |
| | 204475727 (+) | GACTTTTAATCTGAGGGTCCAGGGTTCAA |
| | | GTCCCTGTTCGGGCG |
| 167 | Lys_TTT_chr6: 27559593- | GCCTGGATAGCTCAGTCGGTAGAGCATCA |
| | 27559665 (−) | GACTTTTAATCTGAGGGTCCAGGGTTCAA |
| | | GTCCCTGTTCAGGCG |
| 168 | Lys_TTT_chr11: 59323902- | GCCCGGATAGCTCAGTCGGTAGAGCATCA |
| | 59323974 (+) | GACTTTTAATCTGAGGGTCCGGGGTTCAA |
| | | GTCCCTGTTCGGGCG |
| 169 | Lys_TTT_chr6: 27302769- | GCCTGGGTAGCTCAGTCGGTAGAGCATCA |
| | 27302841 (−) | GACTTTTAATCTGAGGGTCCAGGGTTCAA |
| | | GTCCCTGTCCAGGCG |
| 170 | Lys_TTT_chr6: 28715521- | GCCTGGATAGCTCAGTTGGTAGAACATCA |
| | 28715593 (+) | GACTTTTAATCTGACGGTGCAGGGTTCAA |
| | | GTCCCTGTTCAGGCG |
| 171 | Met_CAT_chr8: 124169470- | GCCTCGTTAGCGCAGTAGGTAGCGCGTCA |
| | 124169542 (−) | GTCTCATAATCTGAAGGTCGTGAGTTCGA |
| | | TCCTCACACGGGGCA |
| 172 | Met_CAT_chr16: 71460396- | GCCCTCTTAGCGCAGTGGGCAGCGCGTCA |
| | 71460468 (+) | GTCTCATAATCTGAAGGTCCTGAGTTCGA |
| | | GCCTCAGAGAGGGCA |
| 173 | Met_CAT_chr6: 28912352- | GCCTCCTTAGCGCAGTAGGCAGCGCGTCA |
| | 28912424 (+) | GTCTCATAATCTGAAGGTCCTGAGTTCGA |
| | | ACCTCAGAGGGGGCA |
| 174 | Met_CAT_chr6: 26735574- | GCCCTCTTAGCGCAGCGGGCAGCGCGTCA |
| | 26735646 (−) | GTCTCATAATCTGAAGGTCCTGAGTTCGA |
| | | GCCTCAGAGAGGGCA |
| 175 | Met_CAT_chr6: 26701712- | GCCCTCTTAGCGCAGCTGGCAGCGCGTCA |
| | 26701784 (+) | GTCTCATAATCTGAAGGTCCTGAGTTCAA |
| | | GCCTCAGAGAGGGCA |
| 176 | Met_CAT_chr16: 87417628- | GCCTCGTTAGCGCAGTAGGCAGCGCGTCA |
| | 87417700 (−) | GTCTCATAATCTGAAGGTCGTGAGTTCGA |
| | | GCCTCACACGGGGCA |
| 177 | Met_CAT_chr6: 58168492- | GCCCTCTTAGTGCAGCTGGCAGCGCGTCA |
| | 58168564 (−) | GTTTCATAATCTGAAAGTCCTGAGTTCAA |
| | | GCCTCAGAGAGGGCA |
| 178 | Phe_GAA_chr6: 28758499- | GCCGAAATAGCTCAGTTGGGAGAGCGTTA |
| | 28758571 (−) | GACTGAAGATCTAAAGGTCCCTGGTTCGA |
| | | TCCCGGGTTTCGGCA |
| 179 | Phe_GAA_chr11: 59333853- | GCCGAAATAGCTCAGTTGGGAGAGCGTTA |
| | 59333925 (−) | GACTGAAGATCTAAAGGTCCCTGGTTCAA |
| | | TCCCGGGTTTCGGCA |
| 180 | Phe_GAA_chr6: 28775610- | GCCGAGATAGCTCAGTTGGGAGAGCGTTA |
| | 28775682 (−) | GACTGAAGATCTAAAGGTCCCTGGTTCAA |
| | | TCCCGGGTTTCGGCA |
| 181 | Phe_GAA_chr6: 28791093- | GCCGAAATAGCTCAGTTGGGAGAGCGTTA |
| | 28791166 (−) | GACCGAAGATCTTAAAGGTCCCTGGTTCA |
| | | ATCCCGGGTTTCGGCA |
| 182 | Phe_GAA_chr6: 28731374- | GCTGAAATAGCTCAGTTGGGAGAGCGTTA |
| | 28731447 (−) | GACTGAAGATCTTAAAGTTCCCTGGTTCA |
| | | ACCCTGGGTTTCAGCC |
| 183 | Pro_AGG_chr16: 3241989- | GGCTCGTTGGTCTAGGGGTATGATTCTCG |
| | 3242060 (+) | CTTAGGATGCGAGAGGTCCCGGGTTCAAA |
| | | TCCCGGACGAGCCC |
| 184 | Pro_AGG_chr1: 167684725- | GGCTCGTTGGTCTAGGGGTATGATTCTCG |
| | 167684796 (−) | CTTAGGGTGCGAGAGGTCCCGGGTTCAAA |
| | | TCCCGGACGAGCCC |
| 185 | Pro_CGG_chr1: 167683962- | GGCTCGTTGGTCTAGGGGTATGATTCTCG |
| | 167684033 (+) | CTTCGGGTGCGAGAGGTCCCGGGTTCAAA |
| | | TCCCGGACGAGCCC |
| 186 | Pro_CGG_chr6: 27059521- | GGCTCGTTGGTCTAGGGGTATGATTCTCG |
| | 27059592 (+) | CTTCGGGTGTGAGAGGTCCCGGGTTCAAA |
| | | TCCCGGACGAGCCC |
| 187 | Pro_TGG_chr14: 21101165- | GGCTCGTTGGTCTAGTGGTATGATTCTCG |
| | 21101236 (+) | CTTTGGGTGCGAGAGGTCCCGGGTTCAAA |
| | | TCCCGGACGAGCCC |
| 188 | Pro_TGG_chr11: 75946869- | GGCTCGTTGGTCTAGGGGTATGATTCTCG |
| | 75946940 (−) | GTTTGGGTCCGAGAGGTCCCGGGTTCAAA |
| | | TCCCGGACGAGCCC |
| 189 | Pro_TGG_chr5: 180615854- | GGCTCGTTGGTCTAGGGGTATGATTCTCG |
| | 180615925 (−) | CTTTGGGTGCGAGAGGTCCCGGGTTCAAA |
| | | TCCCGGACGAGCCC |
| 190 | SeC_TCA_chr19: 45981859- | GCCCGGATGATCCTCAGTGGTCTGGGGTG |
| | 45981945 (−) | CAGGCTTCAAACCTGTAGCTGTCTAGCGA |
| | | CAGAGTGGTTCAATTCCACCTTTCGGGCG |
| 191 | SeC_TCA_chr22: 44546537- | GCTCGGATGATCCTCAGTGGTCTGGGGTG |
| | 44546620 (+) | CAGGCTTCAAACCTGTAGCTGTCTAGTGA |
| | | CAGAGTGGTTCAATTCCACCTTTGTA |
| 192 | Ser_AGA_chr6: 27509554- | GTAGTCGTGGCCGAGTGGTTAAGGCGATG |
| | 27509635 (−) | GACTAGAAATCCATTGGGGTTTCCCCGCG |
| | | CAGGTTCGAATCCTGCCGACTACG |
| 193 | Ser_AGA_chr6: 26327817- | GTAGTCGTGGCCGAGTGGTTAAGGCGATG |
| | 26327898 (+) | GACTAGAAATCCATTGGGGTCTCCCCGCG |
| | | CAGGTTCGAATCCTGCCGACTACG |
| 194 | Ser_AGA_chr6: 27499987- | GTAGTCGTGGCCGAGTGGTTAAGGCGATG |
| | 27500068 (+) | GACTAGAAATCCATTGGGGTTTCCCCACG |
| | | CAGGTTCGAATCCTGCCGACTACG |
| 195 | Ser_AGA_chr6: 27521192- | GTAGTCGTGGCCGAGTGGTTAAGGTGATG |
| | 27521273 (−) | GACTAGAAACCCATTGGGGTCTCCCCGCG |
| | | CAGGTTCGAATCCTGCCGACTACG |
| 196 | Ser_CGA_chr17: 8042199- | GCTGTGATGGCCGAGTGGTTAAGGCGTTG |
| | 8042280 (−) | GACTCGAAATCCAATGGGGTCTCCCCGCG |
| | | CAGGTTCGAATCCTGCTCACAGCG |
| 197 | Ser_CGA_chr6: 27177628- | GCTGTGATGGCCGAGTGGTTAAGGCGTTG |
| | 27177709 (+) | GACTCGAAATCCAATGGGGTCTCCCCGCG |
| | | CAGGTTCAAATCCTGCTCACAGCG |
| 198 | Ser_CGA_chr6: 27640229- | GCTGTGATGGCCGAGTGGTTAAGGTGTTG |
| | 27640310 (−) | GACTCGAAATCCAATGGGGGTTCCCCGCG |
| | | CAGGTTCAAATCCTGCTCACAGCG |
| 199 | Ser_CGA_chr12: 56584148- | GTCACGGTGGCCGAGTGGTTAAGGCGTTG |
| | 56584229 (+) | GACTCGAAATCCAATGGGGTTTCCCCGCA |
| | | CAGGTTCGAATCCTGTTCGTGACG |
| 200 | Ser_GCT_chr6: 27065085- | GACGAGGTGGCCGAGTGGTTAAGGCGAT |
| | 27065166 (+) | GGACTGCTAATCCATTGTGCTCTGCACGC |
| | | GTGGGTTCGAATCCCACCCTCGTCG |
| 201 | Ser_GCT_chr6: 27265775- | GACGAGGTGGCCGAGTGGTTAAGGCGAT |
| | 27265856 (+) | GGACTGCTAATCCATTGTGCTCTGCACGC |
| | | GTGGGTTCGAATCCCACCTTCGTCG |
| 202 | Ser_GCT_chr11: 66115591- | GACGAGGTGGCCGAGTGGTTAAGGCGAT |
| | 66115672 (+) | GGACTGCTAATCCATTGTGCTTTGCACGC |
| | | GTGGGTTCGAATCCCATCCTCGTCG |
| 203 | Ser_GCT_chr6: 28565117- | GACGAGGTGGCCGAGTGGTTAAGGCGAT |
| | 28565198 (−) | GGACTGCTAATCCATTGTGCTCTGCACGC |
| | | GTGGGTTCGAATCCCATCCTCGTCG |
| 204 | Ser_GCT_chr6: 28180815- | GACGAGGTGGCCGAGTGGTTAAGGCGAT |
| | 28180896 (+) | GGACTGCTAATCCATTGTGCTCTGCACAC |
| | | GTGGGTTCGAATCCCATCCTCGTCG |
| 205 | Scr_GCT_chr6: 26305718- | GGAGAGGCCTGGCCGAGTGGTTAAGGCG |
| | 26305801 (−) | ATGGACTGCTAATCCATTGTGCTCTGCAC |
| | | GCGTGGGTTCGAATCCCATCCTCGTCG |
| 206 | Ser_TGA_chr10: 69524261- | GCAGCGATGGCCGAGTGGTTAAGGCGTTG |
| | 69524342 (+) | GACTTGAAATCCAATGGGGTCTCCCCGCG |
| | | CAGGTTCGAACCCTGCTCGCTGCG |
| 207 | Ser_TGA_chr6: 27513468- | GTAGTCGTGGCCGAGTGGTTAAGGCGATG |
| | 27513549 (+) | GACTTGAAATCCATTGGGGTTTCCCCGCG |
| | | CAGGTTCGAATCCTGCCGACTACG |
| 208 | Ser_TGA_chr6: 26312824- | GTAGTCGTGGCCGAGTGGTTAAGGCGATG |
| | 26312905 (−) | GACTTGAAATCCATTGGGGTCTCCCCGCG |
| | | CAGGTTCGAATCCTGCCGACTACG |
| 209 | Ser_TGA_chr6: 27473607- | GTAGTCGTGGCCGAGTGGTTAAGGCGATG |
| | 27473688 (−) | GACTTGAAATCCATTGGGGTTTCCCCGCG |
| | | CAGGTTCGAATCCTGTCGGCTACG |
| 210 | Thr_AGT_chr17: 8090478- | GGCGCCGTGGCTTAGTTGGTTAAAGCGCC |
| | 8090551 (+) | TGTCTAGTAAACAGGAGATCCTGGGTTCG |
| | | AATCCCAGCGGTGCCT |
| 211 | Thr_AGT_chr6: 26533145- | GGCTCCGTGGCTTAGCTGGTTAAAGCGCC |
| | 26533218 (−) | TGTCTAGTAAACAGGAGATCCTGGGTTCG |
| | | AATCCCAGCGGGGCCT |
| 212 | Thr_AGT_chr6: 28693795- | GGCTCCGTAGCTTAGTTGGTTAAAGCGCC |
| | 28693868 (+) | TGTCTAGTAAACAGGAGATCCTGGGTTCG |
| | | ACTCCCAGCGGGGCCT |
| 213 | Thr_AGT_chr6: 27694473- | GGCTTCGTGGCTTAGCTGGTTAAAGCGCC |
| | 27694546 (+) | TGTCTAGTAAACAGGAGATCCTGGGTTCG |
| | | AATCCCAGCGAGGCCT |
| 214 | Thr_AGT_chr17: 8042770- | GGCGCCGTGGCTTAGCTGGTTAAAGCGCC |
| | 8042843 (−) | TGTCTAGTAAACAGGAGATCCTGGGTTCG |
| | | AATCCCAGCGGTGCCT |
| 215 | Thr_AGT_chr6: 27130050- | GGCCCTGTGGCTTAGCTGGTCAAAGCGCC |
| | 27130123 (+) | TGTCTAGTAAACAGGAGATCCTGGGTTCG |
| | | AATCCCAGCGGGGCCT |
| 216 | Thr_CGT_chr6: 28456770- | GGCTCTATGGCTTAGTTGGTTAAAGCGCC |
| | 28456843 (−) | TGTCTCGTAAACAGGAGATCCTGGGTTCG |
| | | ACTCCCAGTGGGGCCT |
| 217 | Thr_CGT_chr16: 14379750- | GGCGCGGTGGCCAAGTGGTAAGGCGTCG |
| | 14379821 (+) | GTCTCGTAAACCGAAGATCACGGGTTCGA |
| | | ACCCCGTCCGTGCCT |
| 218 | Thr_CGT_chr6: 28615984- | GGCTCTGTGGCTTAGTTGGCTAAAGCGCC |
| | 28616057 (−) | TGTCTCGTAAACAGGAGATCCTGGGTTCG |
| | | AATCCCAGCGGGGCCT |
| 219 | Thr_CGT_chr17: 29877093- | GGCGCGGTGGCCAAGTGGTAAGGCGTCG |
| | 29877164 (+) | GTCTCGTAAACCGAAGATCGCGGGTTCGA |
| | | ACCCCGTCCGTGCCT |
| 220 | Thr_CGT_chr6: 27586135- | GGCCCTGTAGCTCAGCGGTTGGAGCGCTG |
| | 27586208 (+) | GTCTCGTAAACCTAGGGGTCGTGAGTTCA |
| | | AATCTCACCAGGGCCT |
| 221 | Thr_TGT_chr6: 28442329- | GGCTCTATGGCTTAGTTGGTTAAAGCGCC |
| | 28442402 (−) | TGTCTTGTAAACAGGAGATCCTGGGTTCG |
| | | AATCCCAGTAGAGCCT |
| 222 | Thr_TGT_chr1: 222638347- | GGCTCCATAGCTCAGTGGTTAGAGCACTG |
| | 222638419 (+) | GTCTTGTAAACCAGGGGTCGCGAGTTCGA |
| | | TCCTCGCTGGGGCCT |
| 223 | Thr_TGT_chr14: 21081949- | GGCTCCATAGCTCAGGGGTTAGAGCGCTG |
| | 21082021 (−) | GTCTTGTAAACCAGGGGTCGCGAGTTCAA |
| | | TTCTCGCTGGGGCCT |
| 224 | Thr_TGT_chr14: 21099319- | GGCTCCATAGCTCAGGGGTTAGAGCACTG |
| | 21099391 (−) | GTCTTGTAAACCAGGGGTCGCGAGTTCAA |
| | | ATCTCGCTGGGGCCT |
| 225 | Thr_TGT_chr14: 21149849- | GGCCCTATAGCTCAGGGGTTAGAGCACTG |
| | 21149921 (+) | GTCTTGTAAACCAGGGGTCGCGAGTTCAA |
| | | ATCTCGCTGGGGCCT |
| 226 | Thr_TGT_chr5: 180618687- | GGCTCCATAGCTCAGGGGTTAGAGCACTG |
| | 180618758 (−) | GTCTTGTAAACCAGGGTCGCGAGTTCAAA |
| | | TCTCGCTGGGGCCT |
| 227 | Trp_CCA_chr17: 8124187- | GGCCTCGTGGCGCAACGGTAGCGCGTCTG |
| | 8124258 (−) | ACTCCAGATCAGAAGGTTGCGTGTTCAAA |
| | | TCACGTCGGGGTCA |
| 228 | Trp_CCA_chr17: 19411494- | GACCTCGTGGCGCAATGGTAGCGCGTCTG |
| | 19411565 (+) | ACTCCAGATCAGAAGGTTGCGTGTTCAAG |
| | | TCACGTCGGGGTCA |
| 229 | Trp_CCA_chr6: 26319330- | GACCTCGTGGCGCAACGGTAGCGCGTCTG |
| | 26319401 (−) | ACTCCAGATCAGAAGGTTGCGTGTTCAAA |
| | | TCACGTCGGGGTCA |
| 230 | Trp_CCA_chr12: 98898030- | GACCTCGTGGCGCAACGGTAGCGCGTCTG |
| | 98898101 (+) | ACTCCAGATCAGAAGGCTGCGTGTTCGAA |
| | | TCACGTCGGGGTCA |
| 231 | Trp_CCA_chr7: 99067307- | GACCTCGTGGCGCAACGGCAGCGCGTCTG |
| | 99067378 (+) | ACTCCAGATCAGAAGGTTGCGTGTTCAAA |
| | | TCACGTCGGGGTCA |
| 232 | Tyr_ATA_chr2: 219110549- | CCTTCAATAGTTCAGCTGGTAGAGCAGAG |
| | 219110641 (+) | GACTATAGCTACTTCCTCAGTAGGAGACG |
| | | TCCTTAGGTTGCTGGTTCGATTCCAGCTTG |
| | | AAGGA |
| 233 | Tyr_GTA_chr6: 26569086- | CCTTCGATAGCTCAGTTGGTAGAGCGGAG |
| | 26569176 (+) | GACTGTAGTTGGCTGTGTCCTTAGACATC |
| | | CTTAGGTCGCTGGTTCGAATCCGGCTCGA |
| | | AGGA |
| 234 | Tyr_GTA_chr2: 27273650- | CCTTCGATAGCTCAGTTGGTAGAGCGGAG |
| | 27273738 (+) | GACTGTAGTGGATAGGGCGTGGCAATCCT |
| | | TAGGTCGCTGGTTCGATTCCGGCTCGAAG |
| | | GA |
| 235 | Tyr_GTA_chr6: 26577332- | CCTTCGATAGCTCAGTTGGTAGAGCGGAG |
| | 26577420 (+) | GACTGTAGGCTCATTAAGCAAGGTATCCT |
| | | TAGGTCGCTGGTTCGAATCCGGCTCGGAG |
| | | GA |
| 236 | Tyr_GTA_chr14: 21125623- | CCTTCGATAGCTCAGCTGGTAGAGCGGAG |
| | 21125716 (−) | GACTGTAGATTGTATAGACATTTGCGGAC |
| | | ATCCTTAGGTCGCTGGTTCGATTCCAGCTC |
| | | GAAGGA |
| 237 | Tyr_GTA_chr8: 67025602- | CCTTCGATAGCTCAGCTGGTAGAGCGGAG |
| | 67025694 (+) | GACTGTAGCTACTTCCTCAGCAGGAGACA |
| | | TCCTTAGGTCGCTGGTTCGATTCCGGCTCG |
| | | AAGGA |
| 238 | Tyr_GTA_chr8: 67026223- | CCTTCGATAGCTCAGCTGGTAGAGCGGAG |
| | 67026311 (+) | GACTGTAGGCGCGCGCCCGTGGCCATCCT |
| | | TAGGTCGCTGGTTCGATTCCGGCTCGAAG |
| | | GA |
| 239 | Tyr_GTA_chr14: 21121258- | CCTTCGATAGCTCAGCTGGTAGAGCGGAG |
| | 21121351 (−) | GACTGTAGCCTGTAGAAACATTTGTGGAC |
| | | ATCCTTAGGTCGCTGGTTCGATTCCGGCTC |
| | | GAAGGA |
| 240 | Tyr_GTA_chr14: 21131351- | CCTTCGATAGCTCAGCTGGTAGAGCGGAG |
| | 21131444 (−) | GACTGTAGATTGTACAGACATTTGCGGAC |
| | | ATCCTTAGGTCGCTGGTTCGATTCCGGCTC |
| | | GAAGGA |
| 241 | Tyr_GTA_chr14: 21151432- | CCTTCGATAGCTCAGCTGGTAGAGCGGAG |
| | 21151520 (+) | GACTGTAGTACTTAATGTGTGGTCATCCTT |
| | | AGGTCGCTGGTTCGATTCCGGCTCGAAGG |
| | | A |
| 242 | Tyr_GTA_chr6: 26595102- | CCTTCGATAGCTCAGCTGGTAGAGCGGAG |
| | 26595190 (+) | GACTGTAGGGGTTTGAATGTGGTCATCCT |
| | | TAGGTCGCTGGTTCGAATCCGGCTCGGAG |
| | | GA |
| 243 | Tyr_GTA_chr14: 21128117- | CCTTCGATAGCTCAGCTGGTAGAGCGGAG |
| | 21128210 (−) | GACTGTAGACTGCGGAAACGTTTGTGGAC |
| | | ATCCTTAGGTCGCTGGTTCAATTCCGGCTC |
| | | GAAGGA |
| 244 | Tyr_GTA_chr6: 26575798- | CTTTCGATAGCTCAGTTGGTAGAGCGGAG |
| | 26575887 (+) | GACTGTAGGTTCATTAAACTAAGGCATCC |
| | | TTAGGTCGCTGGTTCGAATCCGGCTCGAA |
| | | GGA |
| 245 | Tyr_GTA_chr8: 66609532- | TCTTCAATAGCTCAGCTGGTAGAGCGGAG |
| | 66609619 (−) | GACTGTAGGTGCACGCCCGTGGCCATTCT |
| | | TAGGTGCTGGTTTGATTCCGACTTGGAGA |
| | | G |
| 246 | Val_AAC_chr3: 169490018- | GTTTCCGTAGTGTAGTGGTTATCACGTTCG |
| | 169490090 (+) | CCTAACACGCGAAAGGTCCCCGGTTCGAA |
| | | ACCGGGCGGAAACA |
| 247 | Val_AAC_chr5: 180615416- | GTTTCCGTAGTGTAGTGGTCATCACGTTC |
| | 180615488 (−) | GCCTAACACGCGAAAGGTCCCCGGTTCGA |
| | | AACCGGGCGGAAACA |
| 248 | Val_AAC_chr6: 27618707- | GTTTCCGTAGTGTAGTGGTTATCACGTTCG |
| | 27618779 (−) | CCTAACACGCGAAAGGTCCCTGGATCAAA |
| | | ACCAGGCGGAAACA |
| 249 | Val_AAC_chr6: 27648885- | GTTTCCGTAGTGTAGTGGTTATCACGTTCG |
| | 27648957 (−) | CCTAACACGCGAAAGGTCCGCGGTTCGAA |
| | | ACCGGGCGGAAACA |
| 250 | Val_AAC_chr6: 27203288- | GTTTCCGTAGTGTAGTGGTTATCACGTTTG |
| | 27203360 (+) | CCTAACACGCGAAAGGTCCCCGGTTCGAA |
| | | ACCGGGCAGAAACA |
| 251 | Val_AAC_chr6: 28703206- | GGGGGTGTAGCTCAGTGGTAGAGCGTATG |
| | 28703277 (−) | CTTAACATTCATGAGGCTCTGGGTTCGAT |
| | | CCCCAGCACTTCCA |
| 252 | Val_CAC_chr1: 161369490- | GTTTCCGTAGTGTAGTGGTTATCACGTTCG |
| | 161369562 (−) | CCTCACACGCGAAAGGTCCCCGGTTCGAA |
| | | ACCGGGCGGAAACA |
| 253 | Val_CAC_chr6: 27248049- | GCTTCTGTAGTGTAGTGGTTATCACGTTCG |
| | 27248121 (−) | CCTCACACGCGAAAGGTCCCCGGTTCGAA |
| | | ACCGGGCAGAAGCA |
| 254 | Val_CAC_chr19: 4724647- | GTTTCCGTAGTGTAGCGGTTATCACATTC |
| | 4724719 (−) | GCCTCACACGCGAAAGGTCCCCGGTTCGA |
| | | TCCCGGGCGGAAACA |
| 255 | Val_CAC_chr1: 149298555- | GTTTCCGTAGTGTAGTGGTTATCACGTTCG |
| | 149298627 (−) | CCTCACACGCGAAAGGTCCCCGGTTCGAA |
| | | ACTGGGCGGAAACA |
| 256 | Val_CAC_chr1: 149684088- | GTTTCCGTAGTGTAGTGGTTATCACGTTCG |
| | 149684161 (−) | CCTCACACGCGTAAAGGTCCCCGGTTCGA |
| | | AACCGGGCGGAAACA |
| 257 | Val_CAC_chr6: 27173867- | GTTTCCGTAGTGGAGTGGTTATCACGTTC |
| | 27173939 (−) | GCCTCACACGCGAAAGGTCCCCGGTTTGA |
| | | AACCAGGCGGAAACA |
| 258 | Val_TAC_chr11: 59318102- | GGTTCCATAGTGTAGTGGTTATCACGTCT |
| | 59318174 (−) | GCTTTACACGCAGAAGGTCCTGGGTTCGA |
| | | GCCCCAGTGGAACCA |
| 259 | Val_TAC_chr11: 59318460- | GGTTCCATAGTGTAGCGGTTATCACGTCT |
| | 59318532 (−) | GCTTTACACGCAGAAGGTCCTGGGTTCGA |
| | | GCCCCAGTGGAACCA |
| 260 | Val_TAC_chr10: 5895674- | GGTTCCATAGTGTAGTGGTTATCACATCT |
| | 5895746 (−) | GCTTTACACGCAGAAGGTCCTGGGTTCAA |
| | | GCCCCAGTGGAACCA |
| 261 | Val_TAC_chr6: 27258405- | GTTTCCGTGGTGTAGTGGTTATCACATTCG |
| | 27258477 (+) | CCTTACACGCGAAAGGTCCTCGGGTCGAA |
| | | ACCGAGCGGAAACA |
| 262 | iMet_CAT_chr1: 153643726- | AGCAGAGTGGCGCAGCGGAAGCGTGCTG |
| | 153643797 (+) | GGCCCATAACCCAGAGGTCGATGGATCGA |
| | | AACCATCCTCTGCTA |
| 263 | iMet_CAT_chr6: 27745664- | AGCAGAGTGGCGCAGCGGAAGCGTGCTG |
| | 27745735 (+) | GGCCCATAACCCAGAGGTCGATGGATCTA |
| | | AACCATCCTCTGCTA |
| 264 | Glu_TTC_chr1: 16861773- | TCCCTGGTGGTCTAGTGGCTAGGATTCGG |
| | 16861845 (−) | CGCTTTCACCGCCGCGGCCCGGGTTCGAT |
| | | TCCCGGTCAGGGAAT |
| 265 | Gly_CCC_chr1: 17004765- | GCGTTGGTGGTTTAGTGGTAGAATTCTCG |
| | 17004836 (−) | CCTCCCATGCGGGAGACCCGGGTTCAATT |
| | | CCCGGCCACTGCAC |
| 266 | Gly_CCC_chr1: 17053779- | GGCCTTGGTGGTGCAGTGGTAGAATTCTC |
| | 17053850 (+) | GCCTCCCACGTGGGAGACCCGGGTTCAAT |
| | | TCCCGGCCAATGCA |
| 267 | Glu_TTC_chr1: 17199077- | GTCCCTGGTGGTCTAGTGGCTAGGATTCG |
| | 17199149 (+) | GCGCTTTCACCGCCGCGGCCCGGGTTCGA |
| | | TTCCCGGCCAGGGAA |
| 268 | Asn_GTT_chr1: 17216171- | TGTCTCTGTGGCGCAATCGGTTAGCGCGT |
| | 17216245 (+) | TCGGCTGTTAACCGAAAGATTGGTGGTTC |
| | | GAGCCCACCCAGGGACG |
| 269 | Arg_TCT_chr1: 94313128- | TGGCTCCGTGGCGCAATGGATAGCGCATT |
| | 94313213 (+) | GGACTTCTAGAGGCTGAAGGCATTCAAAG |
| | | GTTCCGGGTTCGAGTCCCGGCGGAGTCG |
| 270 | Lys_CTT_chr1: 145395521- | GCCCGGCTAGCTCAGTCGGTAGAGCATGA |
| | 145395594 (−) | GACTCTTAATCTCAGGGTCGTGGGTTCGA |
| | | GCCCCACGTTGGGCGC |
| 271 | His_GTG_chr1: 145396880- | GCCGTGATCGTATAGTGGTTAGTACTCTG |
| | 145396952 (−) | CGTTGTGGCCGCAGCAACCTCGGTTCGAA |
| | | TCCGAGTCACGGCAG |
| 272 | Gly_TCC_chr1: 145397863- | GCGTTGGTGGTATAGTGGTGAGCATAGCT |
| | 145397935 (−) | GCCTTCCAAGCAGTTGACCCGGGTTCGAT |
| | | TCCCGGCCAACGCAG |
| 273 | Glu_CTC_chr1: 145399232- | TCCCTGGTGGTCTAGTGGTTAGGATTCGG |
| | 145399304 (−) | CGCTCTCACCGCCGCGGCCCGGGTTCGAT |
| | | TCCCGGTCAGGGAAA |
| 274 | Gln_CTG_chr1: 145963303- | AGGTTCCATGGTGTAATGGTGAGCACTCT |
| | 145963375 (+) | GGACTCTGAATCCAGCGATCCGAGTTCGA |
| | | GTCTCGGTGGAACCT |
| 275 | Asn_GTT_chr1: 148000804- | TGTCTCTGTGGCGTAGTCGGTTAGCGCGT |
| | 148000878 (+) | TCGGCTGTTAACCGAAAAGTTGGTGGTTC |
| | | GAGCCCACCCAGGAACG |
| 276 | Asn_GTT_chr1: 148248114- | TGTCTCTGTGGCGCAATCGGTTAGCGCGT |
| | 148248188 (+) | TCGGCTGTTAACCGAAAGGTTGGTGGTTC |
| | | GAGCCCACCCAGGGACG |
| 277 | Asn_GTT_chr1: 148598313- | GTCTCTGTGGCGCAATCGGTTAGCGCATT |
| | 148598387 (−) | CGGCTGTTAACCGAAAGGTTGGTGGTTCG |
| | | AGCCCACCCAGGGACGC |
| 278 | Asn_GTT_chr1: 149230569- | GTCTCTGTGGCGCAATGGGTTAGCGCGTT |
| | 149230643 (−) | CGGCTGTTAACCGAAAGGTTGGTGGTTCG |
| | | AGCCCATCCAGGGACGC |
| 279 | Val_CAC_chr1: 149294665- | GCACTGGTGGTTCAGTGGTAGAATTCTCG |
| | 149294736 (−) | CCTCACACGCGGGACACCCGGGTTCAATT |
| | | CCCGGTCAAGGCAA |
| 280 | Val_CAC_chr1: 149298554- | GTTTCCGTAGTGTAGTGGTTATCACGTTCG |
| | 149298627 (−) | CCTCACACGCGAAAGGTCCCCGGTTCGAA |
| | | ACTGGGCGGAAACAG |
| 281 | Gly_CCC_chr1: 149680209- | GCACTGGTGGTTCAGTGGTAGAATTCTCG |
| | 149680280 (−) | CCTCCCACGCGGGAGACCCGGGTTTAATT |
| | | CCCGGTCAAGATAA |
| 282 | Val_CAC_chr1: 149684087- | GTTTCCGTAGTGTAGTGGTTATCACGTTCG |
| | 149684161 (−) | CCTCACACGCGTAAAGGTCCCCGGTTCGA |
| | | AACCGGGCGGAAACAT |
| 283 | Met_CAT_chr1: 153643725- | TAGCAGAGTGGCGCAGCGGAAGCGTGCT |
| | 153643797 (+) | GGGCCCATAACCCAGAGGTCGATGGATCG |
| | | AAACCATCCTCTGCTA |
| 284 | Val_CAC_chr1: 161369489- | GTTTCCGTAGTGTAGTGGTTATCACGTTCG |
| | 161369562 (−) | CCTCACACGCGAAAGGTCCCCGGTTCGAA |
| | | ACCGGGCGGAAACAA |
| 285 | Asp_GTC_chr1: 161410614- | TCCTCGTTAGTATAGTGGTGAGTATCCCC |
| | 161410686 (−) | GCCTGTCACGCGGGAGACCGGGGTTCGAT |
| | | TCCCCGACGGGGAGG |
| 286 | Gly_GCC_chr1: 161413093- | TGCATGGGTGGTTCAGTGGTAGAATTCTC |
| | 161413164 (+) | GCCTGCCACGCGGGAGGCCCGGGTTCGAT |
| | | TCCCGGCCCATGCA |
| 287 | Glu_CTC_chr1: 161417017- | TCCCTGGTGGTCTAGTGGTTAGGATTCGG |
| | 161417089 (−) | CGCTCTCACCGCCGCGGCCCGGGTTCGAT |
| | | TCCCGGTCAGGGAAG |
| 288 | Asp_GTC_chr1: 161492934- | ATCCTTGTTACTATAGTGGTGAGTATCTCT |
| | 161493006 (+) | GCCTGTCATGCGTGAGAGAGGGGGTCGAT |
| | | TCCCCGACGGGGAG |
| 289 | Gly_GCC_chr1: 161493636- | GCATTGGTGGTTCAGTGGTAGAATTCTCG |
| | 161493707 (−) | CCTGCCACGCGGGAGGCCCGGGTTCGATT |
| | | CCCGGCCAATGCAC |
| 290 | Leu_CAG_chr1: 161500131- | GTCAGGATGGCCGAGCGGTCTAAGGCGCT |
| | 161500214 (−) | GCGTTCAGGTCGCAGTCTCCCCTGGAGGC |
| | | GTGGGTTCGAATCCCACTCCTGACAA |
| 291 | Gly_TCC_chr1: 161500902- | CGCGTTGGTGGTATAGTGGTGAGCATAGC |
| | 161500974 (+) | TGCCTTCCAAGCAGTTGACCCGGGTTCGA |
| | | TTCCCGGCCAACGCA |
| 292 | Asn_GTT_chr1: 161510030- | CGTCTCTGTGGCGCAATCGGTTAGCGCGT |
| | 161510104 (+) | TCGGCTGTTAACCGAAAGGTTGGTGGTTC |
| | | GATCCCACCCAGGGACG |
| 293 | Glu_TTC_chr1: 161582507- | CGCGTTGGTGGTGTAGTGGTGAGCACAGC |
| | 161582579 (+) | TGCCTTTCAAGCAGTTAACGCGGGTTCGA |
| | | TTCCCGGGTAACGAA |
| 294 | Pro_CGG_chr1: 167683961- | CGGCTCGTTGGTCTAGGGGTATGATTCTC |
| | 167684033 (+) | GCTTCGGGTGCGAGAGGTCCCGGGTTCAA |
| | | ATCCCGGACGAGCCC |
| 295 | Pro_AGG_chr1: 167684724- | GGCTCGTTGGTCTAGGGGTATGATTCTCG |
| | 167684796 (−) | CTTAGGGTGCGAGAGGTCCCGGGTTCAAA |
| | | TCCCGGACGAGCCCT |
| 296 | Lys_TTT_chr1: 204475654- | CGCCCGGATAGCTCAGTCGGTAGAGCATC |
| | 204475727 (+) | AGACTTTTAATCTGAGGGTCCAGGGTTCA |
| | | AGTCCCTGTTCGGGCG |
| 297 | Lys_TTT_chr1: 204476157- | GCCCGGATAGCTCAGTCGGTAGAGCATCA |
| | 204476230 (−) | GACTTTTAATCTGAGGGTCCAGGGTTCAA |
| | | GTCCCTGTTCGGGCGT |
| 298 | Leu_CAA_chr1: 249168053- | TGTCAGGATGGCCGAGTGGTCTAAGGCGC |
| | 249168159 (+) | CAGACTCAAGGTAAGCACCTTGCCTGCGG |
| | | GCTTTCTGGTCTCCGGATGGAGGCGTGGG |
| | | TTCGAATCCCACTTCTGACA |
| 299 | Glu_CTC_chr1: 249168446- | TTCCCTGGTGGTCTAGTGGTTAGGATTCG |
| | 249168518 (+) | GCGCTCTCACCGCCGCGGCCCGGGTTCGA |
| | | TTCCCGGTCAGGAAA |
| 300 | Tyr_GTA_chr2: 27273649- | GCCTTCGATAGCTCAGTTGGTAGAGCGGA |
| | 27273738 (+) | GGACTGTAGTGGATAGGGCGTGGCAATCC |
| | | TTAGGTCGCTGGTTCGATTCCGGCTCGAA |
| | | GGA |
| 301 | Ala_AGC_chr2: 27274081- | CGGGGGATTAGCTCAAATGGTAGAGCGCT |
| | 27274154 (+) | CGCTTAGCATGCGAGAGGTAGCGGGATCG |
| | | ATGCCCGCATCCTCCA |
| 302 | Ile_TAT_chr2: 43037675- | AGCTCCAGTGGCGCAATCGGTTAGCGCGC |
| | 43037768 (+) | GGTACTTATACAGCAGTACATGCAGAGCA |
| | | ATGCCGAGGTTGTGAGTTCGAGCCTCACC |
| | | TGGAGCA |
| 303 | Gly_CCC_chr2: 70476122- | GCGCCGCTGGTGTAGTGGTATCATGCAAG |
| | 70476193 (−) | ATTCCCATTCTTGCGACCCGGGTTCGATTC |
| | | CCGGGCGGCGCAT |
| 304 | Glu_TTC_chr2: 131094700- | TCCCATATGGTCTAGCGGTTAGGATTCCT |
| | 131094772 (−) | GGTTTTCACCCAGGTGGCCCGGGTTCGAC |
| | | TCCCGGTATGGGAAC |
| 305 | Ala_CGC_chr2: 157257280- | GGGGGATGTAGCTCAGTGGTAGAGCGCG |
| | 157257352 (+) | CGCTTCGCATGTGTGAGGTCCCGGGTTCA |
| | | ATCCCCGGCATCTCCA |
| 306 | Gly_GCC_chr2: 157257658- | GCATTGGTGGTTCAGTGGTAGAATTCTCG |
| | 157257729 (−) | CCTGCCACGCGGGAGGCCCGGGTTCGATT |
| | | CCCGGCCAATGCAA |
| 307 | Arg_ACG_chr3: 45730490- | GGGCCAGTGGCGCAATGGATAACGCGTCT |
| | 45730563 (−) | GACTACGGATCAGAAGATTCTAGGTTCGA |
| | | CTCCTGGCTGGCTCGC |
| 308 | Val_AAC_chr3: 169490017- | GGTTTCCGTAGTGTAGTGGTTATCACGTTC |
| | 169490090 (+) | GCCTAACACGCGAAAGGTCCCCGGTTCGA |
| | | AACCGGGCGGAAACA |
| 309 | Val_AAC_chr5: 180596609- | AGTTTCCGTAGTGTAGTGGTTATCACGTTC |
| | 180596682 (+) | GCCTAACACGCGAAAGGTCCCCGGTTCGA |
| | | AACCGGGCGGAAACA |
| 310 | Leu_AAG_chr5: 180614700- | AGGTAGCGTGGCCGAGCGGTCTAAGGCG |
| | 180614782 (+) | CTGGATTAAGGCTCCAGTCTCTTCGGGGG |
| | | CGTGGGTTCGAATCCCACCGCTGCCA |
| 311 | Val_AAC_chr5: 180615415- | GTTTCCGTAGTGTAGTGGTCATCACGTTC |
| | 180615488 (−) | GCCTAACACGCGAAAGGTCCCCGGTTCGA |
| | | AACCGGGCGGAAACAT |
| 312 | Pro_TGG_chr5: 180615853- | GGCTCGTTGGTCTAGGGGTATGATTCTCG |
| | 180615925 (−) | CTTTGGGTGCGAGAGGTCCCGGGTTCAAA |
| | | TCCCGGACGAGCCCA |
| 313 | Thr_TGT_chr5: 180618686- | GGCTCCATAGCTCAGGGGTTAGAGCACTG |
| | 180618758 (−) | GTCTTGTAAACCAGGGTCGCGAGTTCAAA |
| | | TCTCGCTGGGGCCTG |
| 314 | Ala_TGC_chr5: 180633867- | TGGGGATGTAGCTCAGTGGTAGAGCGCAT |
| | 180633939 (+) | GCTTTGCATGTATGAGGCCCCGGGTTCGA |
| | | TCCCCGGCATCTCCA |
| 315 | Lys_CTT_chr5: 180634754- | CGCCCGGCTAGCTCAGTCGGTAGAGCATG |
| | 180634827 (+) | AGACTCTTAATCTCAGGGTCGTGGGTTCG |
| | | AGCCCCACGTTGGGCG |
| 316 | Val_AAC_chr5: 180645269- | GTTTCCGTAGTGTAGTGGTTATCACGTTCG |
| | 180645342 (−) | CCTAACACGCGAAAGGTCCCCGGTTCGAA |
| | | ACCGGGCGGAAACAA |
| 317 | Lys_CTT_chr5: 180648978- | GCCCGGCTAGCTCAGTCGGTAGAGCATGA |
| | 180649051 (−) | GACTCTTAATCTCAGGGTCGTGGGTTCGA |
| | | GCCCCACGTTGGGCGT |
| 318 | Val_CAC_chr5: 180649394- | GTTTCCGTAGTGTAGTGGTTATCACGTTCG |
| | 180649467 (−) | CCTCACACGCGAAAGGTCCCCGGTTCGAA |
| | | ACCGGGCGGAAACAC |
| 319 | Met_CAT_chr6: 26286753- | CAGCAGAGTGGCGCAGCGGAAGCGTGCT |
| | 26286825 (+) | GGGCCCATAACCCAGAGGTCGATGGATCG |
| | | AAACCATCCTCTGCTA |
| 320 | Ser_GCT_chr6: 26305717- | GGAGAGGCCTGGCCGAGTGGTTAAGGCG |
| | 26305801 (−) | ATGGACTGCTAATCCATTGTGCTCTGCAC |
| | | GCGTGGGTTCGAATCCCATCCTCGTCGC |
| 321 | Gln_TTG_chr6: 26311423- | GGCCCCATGGTGTAATGGTTAGCACTCTG |
| | 26311495 (−) | GACTTTGAATCCAGCGATCCGAGTTCAAA |
| | | TCTCGGTGGGACCTG |
| 322 | Gln_TTG_chr6: 26311974- | GGCCCCATGGTGTAATGGTTAGCACTCTG |
| | 26312046 (−) | GACTTTGAATCCAGCGATCCGAGTTCAAA |
| | | TCTCGGTGGGACCTA |
| 323 | Ser_TGA_chr6: 26312823- | GTAGTCGTGGCCGAGTGGTTAAGGCGATG |
| | 26312905 (−) | GACTTGAAATCCATTGGGGTCTCCCCGCG |
| | | CAGGTTCGAATCCTGCCGACTACGG |
| 324 | Met_CAT_chr6: 26313351- | AGCAGAGTGGCGCAGCGGAAGCGTGCTG |
| | 26313423 (−) | GGCCCATAACCCAGAGGTCGATGGATCGA |
| | | AACCATCCTCTGCTAT |
| 325 | Arg_TCG_chr6: 26323045- | GGACCACGTGGCCTAATGGATAAGGCGTC |
| | 26323118 (+) | TGACTTCGGATCAGAAGATTGAGGGTTCG |
| | | AATCCCTCCGTGGTTA |
| 326 | Ser_AGA_chr6: 26327816- | TGTAGTCGTGGCCGAGTGGTTAAGGCGAT |
| | 26327898 (+) | GGACTAGAAATCCATTGGGGTCTCCCCGC |
| | | GCAGGTTCGAATCCTGCCGACTACG |
| 327 | Met_CAT_chr6: 26330528- | AGCAGAGTGGCGCAGCGGAAGCGTGCTG |
| | 26330600 (−) | GGCCCATAACCCAGAGGTCGATGGATCGA |
| | | AACCATCCTCTGCTAG |
| 328 | Leu_CAG_chr6: 26521435- | CGTCAGGATGGCCGAGCGGTCTAAGGCGC |
| | 26521518 (+) | TGCGTTCAGGTCGCAGTCTCCCCTGGAGG |
| | | CGTGGGTTCGAATCCCACTCCTGACA |
| 329 | Thr_AGT_chr6: 26533144- | GGCTCCGTGGCTTAGCTGGTTAAAGCGCC |
| | 26533218 (−) | TGTCTAGTAAACAGGAGATCCTGGGTTCG |
| | | AATCCCAGCGGGGCCTG |
| 330 | Arg_ACG_chr6: 26537725- | AGGGCCAGTGGCGCAATGGATAACGCGT |
| | 26537798 (+) | CTGACTACGGATCAGAAGATTCCAGGTTC |
| | | GACTCCTGGCTGGCTCG |
| 331 | Val_CAC_chr6: 26538281- | GGTTTCCGTAGTGTAGTGGTTATCACGTTC |
| | 26538354 (+) | GCCTCACACGCGAAAGGTCCCCGGTTCGA |
| | | AACCGGGCGGAAACA |
| 332 | Ala_CGC_chr6: 26553730- | AGGGGATGTAGCTCAGTGGTAGAGCGCAT |
| | 26553802 (+) | GCTTCGCATGTATGAGGTCCCGGGTTCGA |
| | | TCCCCGGCATCTCCA |
| 333 | Ile_AAT_chr6: 26554349- | TGGCCGGTTAGCTCAGTTGGTTAGAGCGT |
| | 26554423 (+) | GGTGCTAATAACGCCAAGGTCGCGGGTTC |
| | | GATCCCCGTACGGGCCA |
| 334 | Pro_AGG_chr6: 26555497- | CGGCTCGTTGGTCTAGGGGTATGATTCTC |
| | 26555569 (+) | GCTTAGGGTGCGAGAGGTCCCGGGTTCAA |
| | | ATCCCGGACGAGCCC |
| 335 | Lys_CTT_chr6: 26556773- | AGCCCGGCTAGCTCAGTCGGTAGAGCATG |
| | 26556846 (+) | AGACTCTTAATCTCAGGGTCGTGGGTTCG |
| | | AGCCCCACGTTGGGCG |
| 336 | Tyr_GTA_chr6: 26569085- | TCCTTCGATAGCTCAGTTGGTAGAGCGGA |
| | 26569176 (+) | GGACTGTAGTTGGCTGTGTCCTTAGACAT |
| | | CCTTAGGTCGCTGGTTCGAATCCGGCTCG |
| | | AAGGA |
| 337 | Ala_AGC_chr6: 26572091- | GGGGAATTAGCTCAAATGGTAGAGCGCTC |
| | 26572164 (−) | GCTTAGCATGCGAGAGGTAGCGGGATCG |
| | | ATGCCCGCATTCTCCAG |
| 338 | Met_CAT_chr6: 26766443- | CGCCCTCTTAGCGCAGCGGGCAGCGCGTC |
| | 26766516 (+) | AGTCTCATAATCTGAAGGTCCTGAGTTCG |
| | | AGCCTCAGAGAGGGCA |
| 339 | Ile_TAT_chr6: 26988124- | TGCTCCAGTGGCGCAATCGGTTAGCGCGC |
| | 26988218 (+) | GGTACTTATATGGCAGTATGTGTGCGAGT |
| | | GATGCCGAGGTTGTGAGTTCGAGCCTCAC |
| | | CTGGAGCA |
| 340 | His_GTG_chr6: 27125905- | TGCCGTGATCGTATAGTGGTTAGTACTCT |
| | 27125977 (+) | GCGTTGTGGCCGCAGCAACCTCGGTTCGA |
| | | ATCCGAGTCACGGCA |
| 341 | Ile_AAT_chr6: 27144993- | GGCCGGTTAGCTCAGTTGGTTAGAGCGTG |
| | 27145067 (−) | GTGCTAATAACGCCAAGGTCGCGGGTTCG |
| | | ATCCCCGTACGGGCCAC |
| 342 | Val_AAC_chr6: 27203287- | AGTTTCCGTAGTGTAGTGGTTATCACGTTT |
| | 27203360 (+) | GCCTAACACGCGAAAGGTCCCCGGTTCGA |
| | | AACCGGGCAGAAACA |
| 343 | Val_CAC_chr6: 27248048- | GCTTCTGTAGTGTAGTGGTTATCACGTTCG |
| | 27248121 (−) | CCTCACACGCGAAAGGTCCCCGGTTCGAA |
| | | ACCGGGCAGAAGCAA |
| 344 | Asp_GTC_chr6: 27447452- | TTCCTCGTTAGTATAGTGGTGAGTATCCCC |
| | 27447524 (+) | GCCTGTCACGCGGGAGACCGGGGTTCGAT |
| | | TCCCCGACGGGGAG |
| 345 | Ser_TGA_chr6: 27473606- | GTAGTCGTGGCCGAGTGGTTAAGGCGATG |
| | 27473688 (−) | GACTTGAAATCCATTGGGGTTTCCCCGCG |
| | | CAGGTTCGAATCCTGTCGGCTACGG |
| 346 | Gln_CTG_chr6: 27487307- | AGGTTCCATGGTGTAATGGTTAGCACTCT |
| | 27487379 (+) | GGACTCTGAATCCAGCGATCCGAGTTCAA |
| | | ATCTCGGTGGAACCT |
| 347 | Asp_GTC_chr6: 27551235- | TCCTCGTTAGTATAGTGGTGAGTGTCCCC |
| | 27551307 (−) | GTCTGTCACGCGGGAGACCGGGGTTCGAT |
| | | TCCCCGACGGGGAGA |
| 348 | Val_AAC_chr6: 27618706- | GTTTCCGTAGTGTAGTGGTTATCACGTTCG |
| | 27618779 (−) | CCTAACACGCGAAAGGTCCCTGGATCAAA |
| | | ACCAGGCGGAAACAA |
| 349 | Ile_AAT_chr6: 27655966- | CGGCCGGTTAGCTCAGTTGGTTAGAGCGT |
| | 27656040 (+) | GGTGCTAATAACGCCAAGGTCGCGGGTTC |
| | | GATCCCCGTACTGGCCA |
| 350 | Gln_CTG_chr6: 27759134- | GGCCCCATGGTGTAATGGTCAGCACTCTG |
| | 27759206 (−) | GACTCTGAATCCAGCGATCCGAGTTCAAA |
| | | TCTCGGTGGGACCCA |
| 351 | Gln_TTG_chr6: 27763639- | GGCCCCATGGTGTAATGGTTAGCACTCTG |
| | 27763711 (−) | GACTTTGAATCCAGCGATCCGAGTTCAAA |
| | | TCTCGGTGGGACCTT |
| 352 | Ala_AGC_chr6: 28574932- | TGGGGGTGTAGCTCAGTGGTAGAGCGCGT |
| | 28575004 (+) | GCTTAGCATGTACGAGGTCCCGGGTTCAA |
| | | TCCCCGGCACCTCCA |
| 353 | Ala_AGC_chr6: 28626013- | GGGGATGTAGCTCAGTGGTAGAGCGCATG |
| | 28626085 (−) | CTTAGCATGCATGAGGTCCCGGGTTCGAT |
| | | CCCCAGCATCTCCAG |
| 354 | Ala_CGC_chr6: 28697091- | AGGGGGTGTAGCTCAGTGGTAGAGCGCGT |
| | 28697163 (+) | GCTTCGCATGTACGAGGCCCCGGGTTCGA |
| | | CCCCCGGCTCCTCCA |
| 355 | Ala_AGC_chr6: 28806220- | GGGGGTGTAGCTCAGTGGTAGAGCGCGTG |
| | 28806292 (−) | CTTAGCATGCACGAGGCCCCGGGTTCAAT |
| | | CCCCGGCACCTCCAT |
| 356 | Ala_AGC_chr6: 28831461- | GGGGGTGTAGCTCAGTGGTAGAGCGCGTG |
| | 28831533 (−) | CTTAGCATGCACGAGGCCCCGGGTTCAAT |
| | | CCCCGGCACCTCCAG |
| 357 | Leu_CAA_chr6: 28863999- | GTCAGGATGGCCGAGTGGTCTAAGGCGCC |
| | 28864105 (−) | AGACTCAAGCTAAGCTTCCTCCGCGGTGG |
| | | GGATTCTGGTCTCCAATGGAGGCGTGGGT |
| | | TCGAATCCCACTTCTGACAC |
| 358 | Leu_CAA_chr6: 28908829- | TGTCAGGATGGCCGAGTGGTCTAAGGCGC |
| | 28908934 (+) | CAGACTCAAGCTTGGCTTCCTCGTGTTGA |
| | | GGATTCTGGTCTCCAATGGAGGCGTGGGT |
| | | TCGAATCCCACTTCTGACA |
| 359 | Gln_CTG_chr6: 28909377- | GGTTCCATGGTGTAATGGTTAGCACTCTG |
| | 28909449 (−) | GACTCTGAATCCAGCGATCCGAGTTCAAA |
| | | TCTCGGTGGAACCTT |
| 360 | Leu_AAG_chr6: 28911398- | GGTAGCGTGGCCGAGCGGTCTAAGGCGCT |
| | 28911480 (−) | GGATTAAGGCTCCAGTCTCTTCGGGGGCG |
| | | TGGGTTCGAATCCCACCGCTGCCAG |
| 361 | Met_CAT_chr6: 28912351- | TGCCTCCTTAGCGCAGTAGGCAGCGCGTC |
| | 28912424 (+) | AGTCTCATAATCTGAAGGTCCTGAGTTCG |
| | | AACCTCAGAGGGGGCA |
| 362 | Lys_TTT_chr6: 28918805- | AGCCCGGATAGCTCAGTCGGTAGAGCATC |
| | 28918878 (+) | AGACTTTTAATCTGAGGGTCCAGGGTTCA |
| | | AGTCCCTGTTCGGGCG |
| 363 | Met_CAT_chr6: 28921041- | GCCTCCTTAGCGCAGTAGGCAGCGCGTCA |
| | 28921114 (−) | GTCTCATAATCTGAAGGTCCTGAGTTCGA |
| | | ACCTCAGAGGGGGCAG |
| 364 | Glu_CTC_chr6: 28949975- | TTCCCTGGTGGTCTAGTGGTTAGGATTCG |
| | 28950047 (+) | GCGCTCTCACCGCCGCGGCCCGGGTTCGA |
| | | TTCCCGGTCAGGGAA |
| 365 | Leu_TAA_chr6: 144537683- | CACCAGGATGGCCGAGTGGTTAAGGCGTT |
| | 144537766 (+) | GGACTTAAGATCCAATGGACATATGTCCG |
| | | CGTGGGTTCGAACCCCACTCCTGGTA |
| 366 | Pro_AGG_chr7: 128423503- | TGGCTCGTTGGTCTAGGGGTATGATTCTC |
| | 128423575 (+) | GCTTAGGGTGCGAGAGGTCCCGGGTTCAA |
| | | ATCCCGGACGAGCCC |
| 367 | Arg_CCT_chr7: 139025445- | AGCCCCAGTGGCCTAATGGATAAGGCATT |
| | 139025518 (+) | GGCCTCCTAAGCCAGGGATTGTGGGTTCG |
| | | AGTCCCATCTGGGGTG |
| 368 | Cys_GCA_chr7: 149388271- | GGGGATATAGCTCAGGGGTAGAGCATTTG |
| | 149388343 (−) | ACTGCAGATCAAGAGGTCCCCGGTTCAAA |
| | | TCCGGGTGCCCCCCC |
| 369 | Tyr_GTA_chr8: 67025601- | CCCTTCGATAGCTCAGCTGGTAGAGCGGA |
| | 67025694 (+) | GGACTGTAGCTACTTCCTCAGCAGGAGAC |
| | | ATCCTTAGGTCGCTGGTTCGATTCCGGCTC |
| | | GAAGGA |
| 370 | Tyr_GTA_chr8: 67026222- | CCCTTCGATAGCTCAGCTGGTAGAGCGGA |
| | 67026311 (+) | GGACTGTAGGCGCGCGCCCGTGGCCATCC |
| | | TTAGGTCGCTGGTTCGATTCCGGCTCGAA |
| | | GGA |
| 371 | Ala_AGC_chr8: 67026423- | TGGGGGATTAGCTCAAATGGTAGAGCGCT |
| | 67026496 (+) | CGCTTAGCATGCGAGAGGTAGCGGGATCG |
| | | ATGCCCGCATCCTCCA |
| 372 | Ser_AGA_chr8: 96281884- | GTAGTCGTGGCCGAGTGGTTAAGGCGATG |
| | 96281966 (−) | GACTAGAAATCCATTGGGGTCTCCCCGCG |
| | | CAGGTTCGAATCCTGCCGACTACGG |
| 373 | Met_CAT_chr8: 124169469- | GCCTCGTTAGCGCAGTAGGTAGCGCGTCA |
| | 124169542 (−) | GTCTCATAATCTGAAGGTCGTGAGTTCGA |
| | | TCCTCACACGGGGCAC |
| 374 | Arg_TCT_chr9: 131102354- | GGCTCTGTGGCGCAATGGATAGCGCATTG |
| | 131102445 (−) | GACTTCTAGCTGAGCCTAGTGTGGTCATT |
| | | CAAAGGTTGTGGGTTCGAGTCCCACCAGA |
| | | GTCGA |
| 375 | Asn_GTT_chr10: 22518437- | GTCTCTGTGGCGCAATCGGTTAGCGCGTT |
| | 22518511 (−) | CGGCTGTTAACCGAAAGGTTGGTGGTTCG |
| | | AGCCCACCCAGGGACGC |
| 376 | Ser_TGA_chr10: 69524260- | GGCAGCGATGGCCGAGTGGTTAAGGCGTT |
| | 69524342 (+) | GGACTTGAAATCCAATGGGGTCTCCCCGC |
| | | GCAGGTTCGAACCCTGCTCGCTGCG |
| 377 | Val_TAC_chr11: 59318101- | GGTTCCATAGTGTAGTGGTTATCACGTCT |
| | 59318174 (−) | GCTTTACACGCAGAAGGTCCTGGGTTCGA |
| | | GCCCCAGTGGAACCAT |
| 378 | Val_TAC_chr11: 59318459- | GGTTCCATAGTGTAGCGGTTATCACGTCT |
| | 59318532 (−) | GCTTTACACGCAGAAGGTCCTGGGTTCGA |
| | | GCCCCAGTGGAACCAC |
| 379 | Arg_TCT_chr11: 59318766- | TGGCTCTGTGGCGCAATGGATAGCGCATT |
| | 59318852 (+) | GGACTTCTAGATAGTTAGAGAAATTCAAA |
| | | GGTTGTGGGTTCGAGTCCCACCAGAGTCG |
| 380 | Leu_TAA_chr11: 59319227- | TACCAGAATGGCCGAGTGGTTAAGGCGTT |
| | 59319310 (+) | GGACTTAAGATCCAATGGATTCATATCCG |
| | | CGTGGGTTCGAACCCCACTTCTGGTA |
| 381 | Lys_TTT_chr11: 59323901- | GGCCCGGATAGCTCAGTCGGTAGAGCATC |
| | 59323974 (+) | AGACTTTTAATCTGAGGGTCCGGGGTTCA |
| | | AGTCCCTGTTCGGGCG |
| 382 | Phe_GAA_chr11: 59324969- | GCCGAAATAGCTCAGTTGGGAGAGCGTTA |
| | 59325042 (−) | GACTGAAGATCTAAAGGTCCCTGGTTCGA |
| | | TCCCGGGTTTCGGCAG |
| 383 | Lys_TTT_chr11: 59327807- | GCCCGGATAGCTCAGTCGGTAGAGCATCA |
| | 59327880 (−) | GACTTTTAATCTGAGGGTCCAGGGTTCAA |
| | | GTCCCTGTTCGGGCGG |
| 384 | Phe_GAA_chr11: 59333852- | GCCGAAATAGCTCAGTTGGGAGAGCGTTA |
| | 59333925 (−) | GACTGAAGATCTAAAGGTCCCTGGTTCAA |
| | | TCCCGGGTTTCGGCAG |
| 385 | Ser_GCT_chr11: 66115590- | GGACGAGGTGGCCGAGTGGTTAAGGCGA |
| | 66115672 (+) | TGGACTGCTAATCCATTGTGCTTTGCACG |
| | | CGTGGGTTCGAATCCCATCCTCGTCG |
| 386 | Pro_TGG_chr11: 75946868- | GGCTCGTTGGTCTAGGGGTATGATTCTCG |
| | 75946940 (−) | GTTTGGGTCCGAGAGGTCCCGGGTTCAAA |
| | | TCCCGGACGAGCCCC |
| 387 | Ser_CGA_chr12: 56584147- | AGTCACGGTGGCCGAGTGGTTAAGGCGTT |
| | 56584229 (+) | GGACTCGAAATCCAATGGGGTTTCCCCGC |
| | | ACAGGTTCGAATCCTGTTCGTGACG |
| 388 | Asp_GTC_chr12: 98897280- | CTCCTCGTTAGTATAGTGGTTAGTATCCCC |
| | 98897352 (+) | GCCTGTCACGCGGGAGACCGGGGTTCAAT |
| | | TCCCCGACGGGGAG |
| 389 | Trp_CCA_chr12: 98898029- | GGACCTCGTGGCGCAACGGTAGCGCGTCT |
| | 98898101 (+) | GACTCCAGATCAGAAGGCTGCGTGTTCGA |
| | | ATCACGTCGGGGTCA |
| 390 | Ala_TGC_chr12: 125406300- | GGGGATGTAGCTCAGTGGTAGAGCGCATG |
| | 125406372 (−) | CTTTGCATGTATGAGGCCCCGGGTTCGAT |
| | | CCCCGGCATCTCCAT |
| 391 | Phe_GAA_chr12: 125412388- | GCCGAAATAGCTCAGTTGGGAGAGCGTTA |
| | 125412461 (−) | GACTGAAGATCTAAAGGTCCCTGGTTCGA |
| | | TCCCGGGTTTCGGCAC |
| 392 | Ala_TGC_chr12: 125424511- | AGGGGATGTAGCTCAGTGGTAGAGCGCAT |
| | 125424583 (+) | GCTTTGCACGTATGAGGCCCCGGGTTCAA |
| | | TCCCCGGCATCTCCA |
| 393 | Asn_GTT_chr13: 31248100- | GTCTCTGTGGCGCAATCGGTTAGCGCGTT |
| | 31248174 (−) | CGGCTGTTAACCGAAAGGTTGGTGGTTCG |
| | | AGCCCACCCAGGGACGG |
| 394 | Glu_TTC_chr13: 45492061- | TCCCACATGGTCTAGCGGTTAGGATTCCT |
| | 45492133 (−) | GGTTTTCACCCAGGCGGCCCGGGTTCGAC |
| | | TCCCGGTGTGGGAAC |
| 395 | Thr_TGT_chr14: 21081948- | GGCTCCATAGCTCAGGGGTTAGAGCGCTG |
| | 21082021 (−) | GTCTTGTAAACCAGGGGTCGCGAGTTCAA |
| | | TTCTCGCTGGGGCCTG |
| 396 | Leu_TAG_chr14: 21093528- | TGGTAGTGTGGCCGAGCGGTCTAAGGCGC |
| | 21093610 (+) | TGGATTTAGGCTCCAGTCTCTTCGGGGGC |
| | | GTGGGTTCGAATCCCACCACTGCCA |
| 397 | Thr_TGT_chr14: 21099318- | GGCTCCATAGCTCAGGGGTTAGAGCACTG |
| | 21099391 (−) | GTCTTGTAAACCAGGGGTCGCGAGTTCAA |
| | | ATCTCGCTGGGGCCTC |
| 398 | Pro_TGG_chr14: 21101164- | TGGCTCGTTGGTCTAGTGGTATGATTCTCG |
| | 21101236 (+) | CTTTGGGTGCGAGAGGTCCCGGGTTCAAA |
| | | TCCCGGACGAGCCC |
| 399 | Tyr_GTA_chr14: 21131350- | CCTTCGATAGCTCAGCTGGTAGAGCGGAG |
| | 21131444 (−) | GACTGTAGATTGTACAGACATTTGCGGAC |
| | | ATCCTTAGGTCGCTGGTTCGATTCCGGCTC |
| | | GAAGGAA |
| 400 | Thr_TGT_chr14: 21149848- | AGGCCCTATAGCTCAGGGGTTAGAGCACT |
| | 21149921 (+) | GGTCTTGTAAACCAGGGGTCGCGAGTTCA |
| | | AATCTCGCTGGGGCCT |
| 401 | Tyr_GTA_chr14: 21151431- | TCCTTCGATAGCTCAGCTGGTAGAGCGGA |
| | 21151520 (+) | GGACTGTAGTACTTAATGTGTGGTCATCC |
| | | TTAGGTCGCTGGTTCGATTCCGGCTCGAA |
| | | GGA |
| 402 | Pro_TGG_chr14: 21152174- | TGGCTCGTTGGTCTAGGGGTATGATTCTC |
| | 21152246 (+) | GCTTTGGGTGCGAGAGGTCCCGGGTTCAA |
| | | ATCCCGGACGAGCCC |
| 403 | Lys_CTT_chr14: 58706612- | GCCCGGCTAGCTCAGTCGGTAGAGCATGG |
| | 58706685 (−) | GACTCTTAATCCCAGGGTCGTGGGTTCGA |
| | | GCCCCACGTTGGGCGC |
| 404 | Ile_AAT_chr14: 102783428- | CGGCCGGTTAGCTCAGTTGGTTAGAGCGT |
| | 102783502 (+) | GGTGCTAATAACGCCAAGGTCGCGGGTTC |
| | | GATCCCCGTACGGGCCA |
| 405 | Glu_TTC_chr15: 26327380- | TCCCACATGGTCTAGCGGTTAGGATTCCT |
| | 26327452 (−) | GGTTTTCACCCAGGCGGCCCGGGTTCGAC |
| | | TCCCGGTGTGGGAAT |
| 406 | Ser_GCT_chr15: 40886022- | GACGAGGTGGCCGAGTGGTTAAGGCGAT |
| | 40886104 (−) | GGACTGCTAATCCATTGTGCTCTGCACGC |
| | | GTGGGTTCGAATCCCATCCTCGTCGA |
| 407 | His_GTG_chr15: 45490803- | GCCGTGATCGTATAGTGGTTAGTACTCTG |
| | 45490875 (−) | CGTTGTGGCCGCAGCAACCTCGGTTCGAA |
| | | TCCGAGTCACGGCAT |
| 408 | His_GTG_chr15: 45493348- | CGCCGTGATCGTATAGTGGTTAGTACTCT |
| | 45493420 (+) | GCGTTGTGGCCGCAGCAACCTCGGTTCGA |
| | | ATCCGAGTCACGGCA |
| 409 | Gln_CTG_chr15: 66161399- | GGTTCCATGGTGTAATGGTTAGCACTCTG |
| | 66161471 (−) | GACTCTGAATCCAGCGATCCGAGTTCAAA |
| | | TCTCGGTGGAACCTG |
| 410 | Lys_CTT_chr15: 79152903- | TGCCCGGCTAGCTCAGTCGGTAGAGCATG |
| | 79152976 (+) | GGACTCTTAATCCCAGGGTCGTGGGTTCG |
| | | AGCCCCACGTTGGGCG |
| 411 | Arg_TCG_chr15: 89878303- | GGGCCGCGTGGCCTAATGGATAAGGCGTC |
| | 89878376 (+) | TGACTTCGGATCAGAAGATTGCAGGTTCG |
| | | AGTCCTGCCGCGGTCG |
| 412 | Gly_CCC_chr16: 686735- | GCGCCGCTGGTGTAGTGGTATCATGCAAG |
| | 686806 (−) | ATTCCCATTCTTGCGACCCGGGTTCGATTC |
| | | CCGGGCGGCGCAC |
| 413 | Arg_CCG_chr16: 3200674- | GGGCCGCGTGGCCTAATGGATAAGGCGTC |
| | 3200747 (+) | TGATTCCGGATCAGAAGATTGAGGGTTCG |
| | | AGTCCCTTCGTGGTCG |
| 414 | Arg_CCT_chr16: 3202900- | CGCCCCGGTGGCCTAATGGATAAGGCATT |
| | 3202973 (+) | GGCCTCCTAAGCCAGGGATTGTGGGTTCG |
| | | AGTCCCACCCGGGGTA |
| 415 | Lys_CTT_chr16: 3207405- | GCCCGGCTAGCTCAGTCGGTAGAGCATGA |
| | 3207478 (−) | GACCCTTAATCTCAGGGTCGTGGGTTCGA |
| | | GCCCCACGTTGGGCGT |
| 416 | Thr_CGT_chr16: 14379749- | AGGCGCGGTGGCCAAGTGGTAAGGCGTC |
| | 14379821 (+) | GGTCTCGTAAACCGAAGATCACGGGTTCG |
| | | AACCCCGTCCGTGCCT |
| 417 | Leu_TAG_chr16: 22207031- | GGTAGCGTGGCCGAGTGGTCTAAGGCGCT |
| | 22207113 (−) | GGATTTAGGCTCCAGTCATTTCGATGGCG |
| | | TGGGTTCGAATCCCACCGCTGCCAC |
| 418 | Leu_AAG_chr16: 22308460- | GGGTAGCGTGGCCGAGCGGTCTAAGGCG |
| | 22308542 (+) | CTGGATTAAGGCTCCAGTCTCTTCGGGGG |
| | | CGTGGGTTCGAATCCCACCGCTGCCA |
| 419 | Leu_CAG_chr16: 57333862- | AGTCAGGATGGCCGAGCGGTCTAAGGCG |
| | 57333945 (+) | CTGCGTTCAGGTCGCAGTCTCCCCTGGAG |
| | | GCGTGGGTTCGAATCCCACTTCTGACA |
| 420 | Leu_CAG_chr16: 57334391- | GTCAGGATGGCCGAGCGGTCTAAGGCGCT |
| | 57334474 (−) | GCGTTCAGGTCGCAGTCTCCCCTGGAGGC |
| | | GTGGGTTCGAATCCCACTTCTGACAG |
| 421 | Met_CAT_chr16: 87417627- | GCCTCGTTAGCGCAGTAGGCAGCGCGTCA |
| | 87417700 (−) | GTCTCATAATCTGAAGGTCGTGAGTTCGA |
| | | GCCTCACACGGGGCAG |
| 422 | Leu_TAG_chr17: 8023631- | GGTAGCGTGGCCGAGCGGTCTAAGGCGCT |
| | 8023713 (−) | GGATTTAGGCTCCAGTCTCTTCGGAGGCG |
| | | TGGGTTCGAATCCCACCGCTGCCAG |
| 423 | Arg_TCT_chr17: 8024242- | TGGCTCTGTGGCGCAATGGATAGCGCATT |
| | 8024330 (+) | GGACTTCTAGTGACGAATAGAGCAATTCA |
| | | AAGGTTGTGGGTTCGAATCCCACCAGAGT |
| | | CG |
| 424 | Gly_GCC_chr17: 8029063- | CGCATTGGTGGTTCAGTGGTAGAATTCTC |
| | 8029134 (+) | GCCTGCCACGCGGGAGGCCCGGGTTCGAT |
| | | TCCCGGCCAATGCA |
| 425 | Ser_CGA_chr17: 8042198- | GCTGTGATGGCCGAGTGGTTAAGGCGTTG |
| | 8042280 (−) | GACTCGAAATCCAATGGGGTCTCCCCGCG |
| | | CAGGTTCGAATCCTGCTCACAGCGT |
| 426 | Thr_AGT_chr17: 8042769- | GGCGCCGTGGCTTAGCTGGTTAAAGCGCC |
| | 8042843 (−) | TGTCTAGTAAACAGGAGATCCTGGGTTCG |
| | | AATCCCAGCGGTGCCTG |
| 427 | Trp_CCA_chr17: 8089675- | CGACCTCGTGGCGCAACGGTAGCGCGTCT |
| | 8089747 (+) | GACTCCAGATCAGAAGGTTGCGTGTTCAA |
| | | ATCACGTCGGGGTCA |
| 428 | Ser_GCT_chr17: 8090183- | AGACGAGGTGGCCGAGTGGTTAAGGCGA |
| | 8090265 (+) | TGGACTGCTAATCCATTGTGCTCTGCACG |
| | | CGTGGGTTCGAATCCCATCCTCGTCG |
| 429 | Thr_AGT_chr17: 8090477- | CGGCGCCGTGGCTTAGTTGGTTAAAGCGC |
| | 8090551 (+) | CTGTCTAGTAAACAGGAGATCCTGGGTTC |
| | | GAATCCCAGCGGTGCCT |
| 430 | Trp_CCA_chr17: 8124186- | GGCCTCGTGGCGCAACGGTAGCGCGTCTG |
| | 8124258 (−) | ACTCCAGATCAGAAGGTTGCGTGTTCAAA |
| | | TCACGTCGGGGTCAA |
| 431 | Gly_TCC_chr17: 8124865- | AGCGTTGGTGGTATAGTGGTAAGCATAGC |
| | 8124937 (+) | TGCCTTCCAAGCAGTTGACCCGGGTTCGA |
| | | TTCCCGGCCAACGCA |
| 432 | Asp_GTC_chr17: 8125555- | TCCTCGTTAGTATAGTGGTGAGTATCCCC |
| | 8125627 (−) | GCCTGTCACGCGGGAGACCGGGGTTCGAT |
| | | TCCCCGACGGGGAGA |
| 433 | Pro_CGG_chr17: 8126150- | GGCTCGTTGGTCTAGGGGTATGATTCTCG |
| | 8126222 (−) | CTTCGGGTGCGAGAGGTCCCGGGTTCAAA |
| | | TCCCGGACGAGCCCT |
| 434 | Thr_AGT_chr17: 8129552- | GGCGCCGTGGCTTAGTTGGTTAAAGCGCC |
| | 8129626 (−) | TGTCTAGTAAACAGGAGATCCTGGGTTCG |
| | | AATCCCAGCGGTGCCTT |
| 435 | Ser_AGA_chr17: 8129927- | GTAGTCGTGGCCGAGTGGTTAAGGCGATG |
| | 8130009 (−) | GACTAGAAATCCATTGGGGTCTCCCCGCG |
| | | CAGGTTCGAATCCTGCCGACTACGT |
| 436 | Trp_CCA_chr17: 19411493- | TGACCTCGTGGCGCAATGGTAGCGCGTCT |
| | 19411565 (+) | GACTCCAGATCAGAAGGTTGCGTGTTCAA |
| | | GTCACGTCGGGGTCA |
| 437 | Thr_CGT_chr17: 29877092- | AGGCGCGGTGGCCAAGTGGTAAGGCGTC |
| | 29877164 (+) | GGTCTCGTAAACCGAAGATCGCGGGTTCG |
| | | AACCCCGTCCGTGCCT |
| 438 | Cys_GCA_chr17: 37023897- | AGGGGGTATAGCTCAGTGGTAGAGCATTT |
| | 37023969 (+) | GACTGCAGATCAAGAGGTCCCCGGTTCAA |
| | | ATCCGGGTGCCCCCT |
| 439 | Cys_GCA_chr17: 37025544- | GGGGGTATAGCTCAGTGGTAGAGCATTTG |
| | 37025616 (−) | ACTGCAGATCAAGAGGTCCCTGGTTCAAA |
| | | TCCGGGTGCCCCCTC |
| 440 | Cys_GCA_chr17: 37309986- | GGGGGTATAGCTCAGTGGTAGAGCATTTG |
| | 37310058 (−) | ACTGCAGATCAAGAGGTCCCCGGTTCAAA |
| | | TCCGGGTGCCCCCTC |
| 441 | Gln_TTG_chr17: 47269889- | AGGTCCCATGGTGTAATGGTTAGCACTCT |
| | 47269961 (+) | GGACTTTGAATCCAGCGATCCGAGTTCAA |
| | | ATCTCGGTGGGACCT |
| 442 | Arg_CCG_chr17: 66016012- | GACCCAGTGGCCTAATGGATAAGGCATCA |
| | 66016085 (−) | GCCTCCGGAGCTGGGGATTGTGGGTTCGA |
| | | GTCCCATCTGGGTCGC |
| 443 | Arg_CCT_chr17: 73030000- | AGCCCCAGTGGCCTAATGGATAAGGCACT |
| | 73030073 (+) | GGCCTCCTAAGCCAGGGATTGTGGGTTCG |
| | | AGTCCCACCTGGGGTA |
| 444 | Arg_CCT_chr17: 73030525- | GCCCCAGTGGCCTAATGGATAAGGCACTG |
| | 73030598 (−) | GCCTCCTAAGCCAGGGATTGTGGGTTCGA |
| | | GTCCCACCTGGGGTGT |
| 445 | Arg_TCG_chr17: 73031207- | AGACCGCGTGGCCTAATGGATAAGGCGTC |
| | 73031280 (+) | TGACTTCGGATCAGAAGATTGAGGGTTCG |
| | | AGTCCCTTCGTGGTCG |
| 446 | Asn_GTT_chr19: 1383561- | CGTCTCTGTGGCGCAATCGGTTAGCGCGT |
| | 1383635 (+) | TCGGCTGTTAACCGAAAGGTTGGTGGTTC |
| | | GAGCCCACCCAGGGACG |
| 447 | Gly_TCC_chr19: 4724081- | GGCGTTGGTGGTATAGTGGTTAGCATAGC |
| | 4724153 (+) | TGCCTTCCAAGCAGTTGACCCGGGTTCGA |
| | | TTCCCGGCCAACGCA |
| 448 | Val_CAC_chr19: 4724646- | GTTTCCGTAGTGTAGCGGTTATCACATTC |
| | 4724719 (−) | GCCTCACACGCGAAAGGTCCCCGGTTCGA |
| | | TCCCGGGCGGAAACAG |
| 449 | Thr_AGT_chr19: 33667962- | TGGCGCCGTGGCTTAGTTGGTTAAAGCGC |
| | 33668036 (+) | CTGTCTAGTAAACAGGAGATCCTGGGTTC |
| | | GAATCCCAGCGGTGCCT |
| 450 | Ile_TAT_chr19: 39902807- | GCTCCAGTGGCGCAATCGGTTAGCGCGCG |
| | 39902900 (−) | GTACTTATATGACAGTGCGAGCGGAGCAA |
| | | TGCCGAGGTTGTGAGTTCGATCCTCACCT |
| | | GGAGCAC |
| 451 | Gly_GCC_chr21: 18827106- | GCATGGGTGGTTCAGTGGTAGAATTCTCG |
| | 18827177 (−) | CCTGCCACGCGGGAGGCCCGGGTTCGATT |
| | | CCCGGCCCATGCAG |

### Asialoglycoprotein Receptor Binding Moieties

[0206] The present disclosure features a TREM comprising an asialoglycoprotein receptor (ASGPR) binding moiety. The ASGPR binding moiety may be bound to any nucleotide within the TREM, as well as to the 5′ or 3′ termini. In an embodiment, the ASGPR binding moiety is bound (e.g., directly bound) to a nucleotide, for example, to a sugar moiety, a nucleobase, and/or the internucleotide region. In an embodiment, the ASGPR binding moiety is conjugated to a sugar moiety and/or the internucleotide region within the TREM. In an embodiment, the ASGPR binding moiety is bound to the pos or 4′ positions on the sugar moiety (e.g., ribose moiety) within a nucleotide of the TREM. In an embodiment, the ASGPR binding moiety is bound to the phosphate linker between nucleotides within the TREM.

[0207] The ASGPR is a C-type lectin primarily expressed on the sinusoidal surface of hepatocytes, and comprises a major (48 kDa, ASGPR-1) and a minor (40 kDa, ASGPR-2) subunit. The ASGPR is involved in the binding, internalization, and subsequent clearance of glycoproteins containing an N-terminal galactose (Gal) or N-terminal N-acetylgalactosamine (GalNAc) residues from circulation, such as antibodies. ASGPRs have also been shown to be involved in the clearance of low density lipoprotein, fibronectin, and certain immune cells, and may be utilized by certain viruses for hepatocyte entry (see, e.g., Yang J., et al (2006) J Viral Hepat 13:158-165 and Guy, C S et al (2011) Nat Rev Immunol 8:874-887).

[0208] The ASGPR binding moiety as described herein may refer to structure comprising: (i) a ASGPR carbohydrate and (ii) an ASGPR linker (e.g., a linker connecting the carbohydrate to the TREM). The term “carbohydrate” as used herein refers to compound comprising one or more monosaccharide moieties comprising at least 3 carbon atoms (e.g., arranged in a linear, branched, or cyclic structure) and an oxygen, nitrogen, or sulfur atom, or a fragment or variant of a monosaccharide moiety comprising at least 3 carbon atoms (e.g., arranged in a linear, branched, or cyclic structure) and an oxygen, nitrogen, or sulfur atom. Each monosaccharide moiety or fragment or variant thereof may be a tetrose, pentose, hexose, or heptose. Each monosaccharide moiety or fragment or variant thereof may exist as an aldose, ketose, sugar alcohol, and, where appropriate, in the L or D form. Exemplary monosaccharide moieties may be amino sugars, N-acetylamino sugars, imino sugars, deoxysugars, or sugar acids. Carbohydrates may comprise individual monosaccharide moieties, or may further comprise a disaccharide, oligosaccharide (e.g., a trisaccharide, tetrasaccharide, pentasaccharide, hexasaccharide, heptasaccharide, octasaccharide), a polysaccharide, or combinations thereof. Exemplary carbohydrates include ribose, arabinose, lyxose, xylose, deoxyribose, ribulose, xylulose, glucose, galactose, mannose, gulose, idose, talose, allose, altrose, psicose, fructose, sorbose, tagatose, rhamnose, pneumose, quinovose, fucose, mannuheptulose, sedoheptulose, galactosamine, mannosamine, glucosamine, N-acetylglucosamine, N-acetylgalactosamine, N-acetylmannosamine, glucuronic acid, galacturonic acid, mannuronic acid, guluronic acid, iduronic acid, tagaturonic acid, frucuronic acid, galactosaminuronic acid, mannosaminuronic acid, glucosaminuronic acid, N-acctylglucosaminuronic acid, N-acetylgalactosaminuronic acid, N-acetylmannosaminuronic acid, maltose, lactose, sucrose, trehalose, gentiobiose, cellobiose, chitobiose, kojibiose, nigerose, sophorose, trehalulose, isomaltose, xylobiose, starch, cellulose, chitin, and dextran.

[0209] The carbohydrate may comprise one or more monosaccharide moieties linked by a glycosidic bond. In some embodiments, the glycosidic bond comprises a 1->2 glycosidic bond, a 1->3 glycosidic bond, a 1->4 glycosidic bond, or a 1->6 glycosidic bond. In some embodiments, each glycosidic bond may be present in the alpha or beta configuration. In an embodiment, the one or more monosaccharide moieties are linked directly by a glycosidic bond or are separated by a linker.

[0210] In some embodiments, the ASGPR binding moiety comprises a galactose (Gal), galactosamine (GalNH₂), or an N-acetylgalactosamine (GalNAc) moiety, for example, a Gal, GalNH₂, or GalNAc, or an analog thereof. In an embodiment, the ASGPR binding moiety comprises a GalNAc moiety (e.g., GalNAc). In an embodiment, the ASGPR binding moiety comprises a plurality of GalNAc moieties (e.g., GalNAcs), e.g., at least 2, 3, 4, 5, 6, 7, 8, 9, 10, 11, 12, 13, 14, 15, 16, 17, 18, 19, 20, or more GalNAc moieties (e.g., GalNAcs). In an embodiment, the ASGPR binding moiety comprises between 2 and 20 GalNAcs moieties (e.g., 2, 3, 4, 5, 6, 7, 8, 9, 10, 11, 12, 13, 14, 15, 16, 17, 18, 19, or 20 GalNAc moieties). In an embodiment, the ASGPR binding moiety comprises between 2 and 10 GalNAc moieties (e.g., 2, 3, 4, 5, 6, 7, 8, 9, or 10 GalNAc moieties). In an embodiment, the ASGPR binding moiety comprises between 2 and 5 GalNAc moieties (e.g., 2, 3, 4, or 5 GalNAc moieties). In an embodiment, the ASGPR binding moiety comprises 2 GalNAc moieties. In an embodiment, the ASGPR binding moiety comprises 3 GalNAc moieties. In an embodiment, the ASGPR binding moiety comprises 4 GalNAc moieties. In an embodiment, the ASGPR moieties comprises 5 GalNAc moieties.

[0211] In some embodiments, the GalNAc moiety comprises a structure of Formula (I):

[chemical structure]

or a salt thereof, wherein each of X and Y is independently O, N(R⁷), or S; each of R¹, R³, R⁴, and R⁵ arc independently hydrogen, alkyl, alkenyl, alkynyl, heteroalkyl, haloalkyl, aryl, heteroaryl, cycloalkyl, heterocyclyl, C(O)-alkyl, C(O)-alkenyl, C(O)-alkynyl, C(O)-heteroalkyl, C(O)-haloalkyl, C(O)-aryl, C(O)-heteroaryl, C(O)-cycloalkyl, or C(O)-heterocyclyl, wherein each alkyl, alkenyl, alkynyl, heteroalkyl, haloalkyl, aryl, heteroaryl, cycloalkyl, and heterocyclyl is optionally substituted with one or more R⁸; or R³ and R⁴ are taken together with the oxygen atoms to which they are connected to form a heterocyclyl ring optionally substituted with one or more R⁸; R^{2a} is hydrogen or alkyl; R^{2b} is —C(O)alkyl (e.g., C(O)CH₃); each of R^{6a} and R^{6b} is hydrogen, alkyl, alkenyl, alkynyl, heteroalkyl, haloalkyl, halo, cyano, nitro, —OR^{A}, aryl, heteroaryl, cycloalkyl, or heterocyclyl, wherein each alkyl, alkenyl, alkynyl, heteroalkyl, haloalkyl, aryl, heteroaryl, cycloalkyl, and heterocyclyl is optionally substituted with one or more R⁹; R⁷ is hydrogen, alkyl, or C(O)-alkyl; each of R⁸ and R⁹ is independently hydrogen, halo, cyano, alkyl, alkenyl, alkynyl, heteroalkyl, haloalkyl, cycloalkyl, or heterocyclyl; RA is hydrogen, or alkyl, alkenyl, alkynyl, and n is an integer between 0 and 6, wherein the structure of Formula (I) may be connected to a linker or TREM at any position.

[0212] In some embodiments, X is O. In some embodiments, Y is O. In some embodiments, each of R¹, R³, R⁴, and R⁵ are independently hydrogen or alkyl (e.g., CH₃). In some embodiments, R^{2a} is hydrogen. In some embodiments, R^{2b} is C(O)CH₃. In some embodiments, each of R^{6a} and R^{6b} is hydrogen. In some embodiments, n is 0, 1, 2, or 3. In some embodiments, n is 1, 2, or 3. In some embodiments, n is 1. In some embodiments, the GalNAc moiety is connected to a linker or TREM at R^{2a}. In some embodiments, the GalNAc moiety is connected to a linker or TREM at R^{2b}. In some embodiments, the GalNAc moiety is connected to a linker or TREM at R³. In some embodiments, the GalNAc moiety is connected to a linker or TREM at R⁴. In some embodiments, the GalNAc moiety is connected to a linker or TREM at R⁵. In some embodiments, the GalNAc moiety is connected to a linker or TREM at R^{6a} or R^{6b}. In some embodiments, the GalNAc moiety is connected to a linker or TREM at a plurality of positions, e.g., at least two of R¹, R2a, R2b, R³, R⁴, R⁵, R^{6a}, and R^{6b}.

[0213] In some embodiments, the GalNAc moiety is comprises a structure of Formula (I-a)

[chemical structure]

or a salt thereof, wherein R^{2a} is hydrogen or alkyl; R^{2b} is —C(O)alkyl (e.g., C(O)CH₃); each of R³, R⁴, and R⁵ are independently hydrogen, alkyl, alkenyl, alkynyl, heteroalkyl, haloalkyl, aryl, heteroaryl, cycloalkyl, heterocyclyl, C(O)-alkyl, C(O)-alkenyl, C(O)-alkynyl, C(O)-heteroalkyl, C(O)-haloalkyl, C(O)-aryl, C(O)-heteroaryl, C(O)-cycloalkyl, or C(O)-heterocyclyl, wherein each alkyl, alkenyl, alkynyl, heteroalkyl, haloalkyl, aryl, heteroaryl, cycloalkyl, and heterocyclyl is optionally substituted with one or more R⁸; or R³ and R⁴ are taken together with the oxygen atoms to which they are connected to form a heterocyclyl ring optionally substituted with one or more R⁸; and R⁸ is hydrogen, halo, cyano, alkyl, alkenyl, alkynyl, heteroalkyl, haloalkyl, cycloalkyl, or heterocyclyl, wherein the “ [symbol] ” represents a bond in any configuration, and “ [symbol] ” represents an attachment point to a TREM, e.g., a linker, a nucleobase, internucleotide linkage, or terminus within the TREM sequence.

[0214] In some embodiments, each of R³, R⁴, and R⁵ are independently hydrogen or alkyl (e.g., CH₃). In some embodiments, R^{2a} is hydrogen. In some embodiments, R^{2b} is C(O)CH₃.

[0215] In some embodiments, the GalNAc moiety comprises a structure of Formula (II):

[chemical structure]

or a salt thereof, wherein X is O, N (R⁷), or S; each of W or Y is independently O or C (R^{10a})(R^{10b}), wherein one of W and Y is O; each of R¹, R³, R⁴, and R⁵ are independently hydrogen, alkyl, alkenyl, alkynyl, heteroalkyl, haloalkyl, aryl, heteroaryl, cycloalkyl, heterocyclyl, C(O)-alkyl, C(O)-alkenyl, C(O)-alkynyl, C(O)-heteroalkyl, C(O)-haloalkyl, C(O)-aryl, C(O)-heteroaryl, C(O)-cycloalkyl, or C(O)-heterocyclyl, wherein each alkyl, alkenyl, alkynyl, heteroalkyl, haloalkyl, aryl, heteroaryl, cycloalkyl, and heterocyclyl is optionally substituted with one or more R⁸; or R³ and R⁴ are taken together with the oxygen atoms to which they are connected to form a heterocyclyl ring optionally substituted with one or more R⁸; R^{2a} is hydrogen or alkyl; R^{2b} is —C(O)alkyl (e.g., C(O)CH₃); each of R^{6a} and R^{6b} is hydrogen, alkyl, alkenyl, alkynyl, heteroalkyl, haloalkyl, halo, cyano, nitro, —OR^{A}, aryl, heteroaryl, cycloalkyl, or heterocyclyl, wherein each alkyl, alkenyl, alkynyl, heteroalkyl, haloalkyl, aryl, heteroaryl, cycloalkyl, and heterocyclyl is optionally substituted with one or more R⁹; R⁷ is hydrogen, alkyl, or C(O)-alkyl; each of R⁸ and R⁹ is independently hydrogen, halo, cyano, alkyl, alkenyl, alkynyl, heteroalkyl, haloalkyl, cycloalkyl, or heterocyclyl; each of R^{10a} and R^{10b} is independently hydrogen, heteroalkyl, haloalkyl, or halo; and R^{A} is hydrogen, or alkyl, alkenyl, alkynyl, wherein the structure of Formula (I) may be connected to a TREM, e.g., a linker, a nucleobase, internucleotide linkage, or terminus within the TREM sequence.

[0216] In some embodiments, the GalNAc moiety comprises a structure of Formula (II-a):

[chemical structure]

or a salt thereof, wherein X is O, N (R⁷), or S; each of R¹, R³, R⁴, and R⁵ are independently hydrogen, alkyl, alkenyl, alkynyl, heteroalkyl, haloalkyl, aryl, heteroaryl, cycloalkyl, heterocyclyl, C(O)-alkyl, C(O)-alkenyl, C(O)-alkynyl, C(O)-heteroalkyl, C(O)-haloalkyl, C(O)-aryl, C(O)-heteroaryl, C(O)-cycloalkyl, or C(O)-heterocyclyl, wherein each alkyl, alkenyl, alkynyl, heteroalkyl, haloalkyl, aryl, heteroaryl, cycloalkyl, and heterocyclyl is optionally substituted with one or more R⁸; or R³ and R⁴ are taken together with the oxygen atoms to which they are connected to form a heterocyclyl ring optionally substituted with one or more R⁸; R^{2a} is hydrogen or alkyl; R^{2b} is —C(O)alkyl (e.g., C(O)CH₃); each of R^{6a} and R^{6b} is hydrogen, alkyl, alkenyl, alkynyl, heteroalkyl, haloalkyl, halo, cyano, nitro, —OR^{A}, aryl, heteroaryl, cycloalkyl, or heterocyclyl, wherein each alkyl, alkenyl, alkynyl, heteroalkyl, haloalkyl, aryl, heteroaryl, cycloalkyl, and heterocyclyl is optionally substituted with one or more R⁹; R⁷ is hydrogen, alkyl, or C(O)-alkyl; each of R⁸ and R⁹ is independently hydrogen, halo, cyano, alkyl, alkenyl, alkynyl, heteroalkyl, haloalkyl, cycloalkyl, or heterocyclyl; and RA is hydrogen, or alkyl, alkenyl, alkynyl, wherein the structure of Formula (I) may be connected to a TREM, e.g., a linker, a nucleobase, internucleotide linkage, or terminus within the TREM sequence.

[0217] In some embodiments, the GalNAc moiety comprises a structure of Formula (II-b):

[chemical structure]

or a salt thereof, wherein X is O, N (R⁷), or S; each of R¹, R³, R⁴, and R⁵ are independently hydrogen, alkyl, alkenyl, alkynyl, heteroalkyl, haloalkyl, aryl, heteroaryl, cycloalkyl, heterocyclyl, C(O)-alkyl, C(O)-alkenyl, C(O)-alkynyl, C(O)-heteroalkyl, C(O)-haloalkyl, C(O)-aryl, C(O)-heteroaryl, C(O)-cycloalkyl, or C(O)-heterocyclyl, wherein each alkyl, alkenyl, alkynyl, heteroalkyl, haloalkyl, aryl, heteroaryl, cycloalkyl, and heterocyclyl is optionally substituted with one or more R⁸; or R³ and R⁴ are taken together with the oxygen atoms to which they are connected to form a heterocyclyl ring optionally substituted with one or more R⁸; R^{2a} is hydrogen or alkyl; R^{2b} is —C(O)alkyl (e.g., C(O)CH₃); each of R^{6a} and R^{6b} is hydrogen, alkyl, alkenyl, alkynyl, heteroalkyl, haloalkyl, halo, cyano, nitro, —OR^{A}, aryl, heteroaryl, cycloalkyl, or heterocyclyl, wherein each alkyl, alkenyl, alkynyl, heteroalkyl, haloalkyl, aryl, heteroaryl, cycloalkyl, and heterocyclyl is optionally substituted with one or more R⁹; R⁷ is hydrogen, alkyl, or C(O)-alkyl; each of R⁸ and R⁹ is independently hydrogen, halo, cyano, alkyl, alkenyl, alkynyl, heteroalkyl, haloalkyl, cycloalkyl, or heterocyclyl; and RA is hydrogen, or alkyl, alkenyl, alkynyl, wherein the structure of Formula (I) may be connected to a TREM, e.g., a linker, a nucleobase, internucleotide linkage, or terminus within the TREM sequence.

[0218] In some embodiments, the ASGPR binding moiety comprises a structure of Formula (III):

[chemical structure]

or a salt thereof, wherein each of R¹, R2a, R2b, R³, R⁴, R⁵, R^{6a}, and R^{6b} and subvariables thereof are as defined for Formula (I), L is a linker, and n is an integer between 1 and 100, wherein “ [symbol] ” represents an attachment point to a branching point, additional linker, or TREM, e.g., a linker, a nucleobase, internucleotide linkage, or terminus within the TREM sequence.

[0219] In some embodiments, X is O. In some embodiments, each of R¹, R³, R⁴, and R⁵ arc independently hydrogen or alkyl (e.g., CH₃). In some embodiments, R^{2a} is hydrogen. In some embodiments, R^{2b} is C(O)CH₃. In some embodiments, each of R^{6a} and R^{6b} is hydrogen. In some embodiments, n is an integer between 1 and 50. In some embodiments, n is an integer between 1 and 25. In some embodiments, n is an integer between 1 and 10. In some embodiments, n is an integer between 1 and 5. In some embodiments, n is 1, 2, 3, 4, or 5. In some embodiments, n is 1.

[0220] In an embodiment, L comprises an alkylene, alkenylene, alkynylene, heteroalkylene, or haloalkylene group. In an embodiment, L comprises an ester, amide, disulfide, ether, carbonate, aryl, heteroaryl, cycloalkyl, or heterocyclyl group. In an embodiment, L is cleavable or non-cleavable.

[0221] The term “linker” as used herein refers to an organic moiety that connects two or more parts of a compound, e.g., through a covalent bond. A linker may linear or branched. In some embodiments, a linker comprises a heteroatom, such as a nitrogen, sulfur, oxygen, phosphorus, silicon, or boron atom. In some embodiments, the linker comprises a cyclic group (e.g., an aryl, heteroaryl, cycloalkyl, or heterocyclyl group). In some embodiments, a linker comprises a functional group such as an amide, ketone, ester, ether, thioester, thioether, thiol, hydroxyl, amine, cyano, nitro, azide, triazole, pyrroline, p-nitrophenyl, alkene, or alkyne group. Any atom within a linker may be substituted or unsubstituted. In some embodiments, a linker comprises an arylalkyl, arylalkenyl, arylalkynyl, heteroarylalkyl, heteroarylalkenyl, heteroarylalkynyl, heterocyclylalkyl, heterocyclylalkenyl, heterocyclylalkynyl, aryl, heteroaryl, heterocyclyl, cycloalkyl, cycloalkenyl, alkylarylalkyl, alkylarylalkenyl, alkylarylalkynyl, alkenylarylalkyl, alkenylarylalkenyl, alkenylarylalkynyl, alkynylarylalkyl, alkynylarylalkenyl, alkynylarylalkynyl, alkylheteroarylalkyl, alkylheteroarylalkenyl, alkylheteroarylalkynyl, alkenylheteroarylalkyl, alkenylheteroarylalkenyl, alkenylheteroarylalkynyl, alkynylheteroarylalkyl, alkynylheteroarylalkenyl, alkynylheteroarylalkynyl, alkylheterocyclylalkyl, alkylheterocyclylalkenyl, alkylhererocyclylalkynyl, alkenylheterocyclylalkyl, alkenylheterocyclylalkenyl, alkenylheterocyclylalkynyl, alkynylheterocyclylalkyl, alkynylheterocyclylalkenyl, alkynylheterocyclylalkynyl, alkylaryl, alkenylaryl, alkynylaryl, alkylheteroaryl, alkenylheteroaryl, or alkynylhereroaryl group. In some embodiments, a linker comprises a polyethylene glycol group (e.g., PEG1, PEG2, PEG3, PEG4, PEG5, PEG6, PEG7, PEG8, PEG10, PEG12, PEG14, PEG16, PEG18, PEG20, PEG24, PEG28, PEG32, PEG100, PEG200, PEG250, PEG500, PEG600, PEG700, PEG750, PEG800, PEG900, PEG1000, PEG2000, or PEG3000). In some embodiments, L comprises a PEG1, PEG2, PEG3, PEG4, PEG5, or PEG6 group. In some embodiments, L comprises a plurality of PEG1, PEG2, PEG3, PEG4, PEG5, or PEG6 groups (e.g., 2, 3, 4, or 5 PEG1, PEG2, PEG3, PEG4, PEG5, or PEG6 groups). In some embodiments, L comprises a PEG2 group. In some embodiments, L comprises a plurality of PEG2 groups. In some embodiments, L comprises a PEG3 group. In some embodiments, L comprises a plurality of PEG3 groups. In some embodiments, L comprises a PEG4 group. In some embodiments, L comprises a plurality of PEG4 groups.

[0222] In some embodiments, the linker comprises between 1 and 1000 atoms (e.g., between 1 and 750 atoms, 1 and 500 atoms, 1 and 250 atoms, 1 and 100 atoms, 1 and 75 atoms, 1 and 50 atoms, 1 and 25 atoms, and 1 and 10 atoms). In some embodiments, the linker comprises between 1 and 100 atoms. In some embodiments, the linker comprises between 1 and 50 atoms. In some embodiments, the linker comprises between 1 and 25 atoms.

[0223] In some embodiments, the linker is linear and comprises between 1 and 1000 atoms (e.g., between 1 and 750 atoms, 1 and 500 atoms, 1 and 250 atoms, 1 and 100 atoms, 1 and 75 atoms, 1 and 50 atoms, 1 and 25 atoms, and 1 and 10 atoms). In some embodiments, the linker is linear and comprises between 1 and 100 atoms. In some embodiments, the linker is linear and comprises between 1 and 50 atoms. In some embodiments, the linker is linear and comprises between 1 and 25 atoms.

[0224] In some embodiments, the linker is branched, and each branch comprises between 1 and 1000 atoms (e.g., between 1 and 750 atoms, 1 and 500 atoms, 1 and 250 atoms, 1 and 100 atoms, 1 and 75 atoms, 1 and 50 atoms, 1 and 25 atoms, and 1 and 10 atoms). In some embodiments, the linker is branched, and each branch comprises between 1 and 100 atoms. In some embodiments, the linker is branched, and each branch comprises between 1 and 50 atoms. In some embodiments, the linker is branched, and each branch comprises between 1 and 25 atoms.

[0225] In some embodiments, the ASGPR binding moiety comprises a structure of Formula (III-a):

[chemical structure]

or a salt thereof, wherein each of R¹, R^{2a}, R^{2b}, R³, R⁴, R⁵, R^{6a}, and R^{6b} and subvariables thereof are as defined for Formula (I), each of L¹ and L² is independently a linker, each of m and n is independently an integer between 1 and 100, and M is a linker, wherein “ [symbol] ” represents an attachment point to a branching point, additional linker, or TREM, e.g., a linker, a nucleobase, internucleotide linkage, or terminus within the TREM sequence.

[0226] In some embodiments, X is O (e.g., X in each of A and B is O). In some embodiments, each of R¹, R³, R⁴, and R⁵ are independently hydrogen or alkyl (e.g., CH₃) (e.g., R¹, R³, R⁴, and R⁵ in each of A and B is independently hydrogen or alkyl). In some embodiments, R^{2a} is hydrogen (e.g., R^{2a} in each of A and B is hydrogen). In some embodiments, R^{2b} is C(O)CH₃ (e.g., R^{2b} in each of A and B is C(O)CH₃). In some embodiments, each of R^{6a} and R^{6b} is hydrogen (e.g., R^{6a} and R^{6b} in each of A and B is hydrogen). In some embodiments, each of m and n is independently an integer between 1 and 50. In some embodiments, each of m and n is independently an integer between 1 and 25. In some embodiments, each of m and n is independently an integer between 1 and 10. In some embodiments, each of m and n is independently an integer between 1 and 5. In some embodiments, each of m and n is independently 1, 2, 3, 4, or 5. In some embodiments, each of m and n is independently 1.

[0227] In an embodiment, each of L¹ and L² independently comprises an alkylene, alkenylene, alkynylene, heteroalkylene, or haloalkylene group. In an embodiment, each of L¹ and L² independently comprises an ester, amide, disulfide, ether, carbonate, aryl, heteroaryl, cycloalkyl, or heterocyclyl group. In an embodiment, each of L¹ and L² independently is cleavable or non-cleavable. In some embodiments, each of L¹ and L² independently comprises a polyethylene glycol group (e.g., PEG1, PEG2, PEG3, PEG4, PEG5, PEG6, PEG7, PEG8, PEG10, PEG12, PEG14, PEG16, PEG18, PEG20, PEG24, PEG28, PEG32, PEG100, PEG200, PEG250, PEG500, PEG600, PEG700, PEG750, PEG800, PEG900, PEG1000, PEG2000, or PEG3000). In some embodiments, each of L¹ and L² independently comprises a PEG1, PEG2, PEG3, PEG4, PEG5, or PEG6 group. In some embodiments, each of L¹ and L² independently comprises a plurality of PEG1, PEG2, PEG3, PEG4, PEG5, or PEG6 groups (e.g., 2, 3, 4, or 5 PEG1, PEG2, PEG3, PEG4, PEG5, or PEG6 groups). In some embodiments, each of L¹ and L² independently comprises a PEG2 group. In some embodiments, each of L¹ and L² independently comprises a plurality of PEG2 groups. In some embodiments, each of L¹ and L² independently comprises a PEG3 group. In some embodiments, each of L¹ and L² independently comprises a plurality of PEG3 groups. In some embodiments, each of L¹ and L² independently comprises a PEG4 group. In some embodiments, each of L¹ and L² independently comprises a plurality of PEG4 groups.

[0228] In some embodiments, M comprises an alkylene, alkenylene, alkynylene, heteroalkylene, or haloalkylene group. In an embodiment, M comprises an ester, amide, disulfide, ether, carbonate, aryl, heteroaryl, cycloalkyl, or heterocyclyl group. In an embodiment, M is cleavable or non-cleavable.

[0229] In some embodiments, the ASGPR binding moiety comprises a structure of Formula (III-b):

[chemical structure]

or a salt thereof, wherein each of R¹, R^{2a}, R^{2b}, R³, R⁴, R⁵, R^{6a}, and R^{6b} and subvariables thereof are as defined for Formula (I), each of L¹, L², and L³ is independently a linker, each of m, n, and o is independently an integer between 1 and 100, and M is a linker, wherein “ [symbol] ” represents an attachment point to a branching point, additional linker, or TREM, e.g., a linker, a nucleobase, internucleotide linkage, or terminus within the TREM sequence.

[0230] In some embodiments, X is O (e.g., X in each of A, B, and C is O). In some embodiments, each of R¹, R³, R⁴, and R⁵ are independently hydrogen or alkyl (e.g., CH₃) (e.g., R¹, R³, R⁴, and R⁵ in each of A, B, and C is independently hydrogen or alkyl). In some embodiments, R^{2a} is hydrogen (e.g., R^{2a} in each of A, B, and C is hydrogen). In some embodiments, R^{2b} is C(O)CH₃ (e.g., R^{2b} in each of A, B, and C is C(O)CH₃). In some embodiments, each of R^{6a} and R^{6b} is hydrogen (e.g., R^{6a} and R^{6b} in each of A, B, and C is hydrogen). In some embodiments, each of m, n, and o is independently an integer between 1 and 50. In some embodiments, each of m, n, and o is independently an integer between 1 and 25. In some embodiments, each of m, n, and o is independently an integer between 1 and 10. In some embodiments, each of m, n, and o is independently an integer between 1 and 5. In some embodiments, each of m, n, and o is independently 1, 2, 3, 4, or 5. In some embodiments, each of m, n, and o is independently 1.

[0231] In an embodiment, each of L¹, L², and L³ independently comprises an alkylene, alkenylene, alkynylene, heteroalkylene, or haloalkylene group. In an embodiment, each of L¹, L², and L³ independently comprises an ester, amide, disulfide, ether, carbonate, aryl, heteroaryl, cycloalkyl, or heterocyclyl group. In an embodiment, each of L¹, L², and L³ independently is cleavable or non-cleavable. In an embodiment, each of L¹ and L² independently is cleavable or non-cleavable. In some embodiments, each of L¹, L², and L³ independently comprises a polyethylene glycol group (e.g., PEG1, PEG2, PEG3, PEG4, PEG5, PEG6, PEG7, PEG8, PEG10, PEG12, PEG14, PEG16, PEG18, PEG20, PEG24, PEG28, PEG32, PEG100, PEG200, PEG250, PEG500, PEG600, PEG700, PEG750, PEG800, PEG900, PEG1000, PEG2000, or PEG3000). In some embodiments, each of L¹, L², and L³ independently comprises a PEG1, PEG2, PEG3, PEG4, PEG5, or PEG6 group. In some embodiments, each of L¹, L², and L³ independently comprises a plurality of PEG1, PEG2, PEG3, PEG4, PEG5, or PEG6 groups (e.g., 2, 3, 4, or 5 PEG1, PEG2, PEG3, PEG4, PEG5, or PEG6 groups). In some embodiments, each of L¹, L², and L³ independently comprises a PEG2 group. In some embodiments, each of L¹, L², and L³ independently comprises a plurality of PEG2 groups. In some embodiments, each of L¹, L², and L³ independently comprises a PEG3 group. In some embodiments, each of L¹, L², and L³ independently comprises a plurality of PEG3 groups. In some embodiments, each of L¹, L², and L³ independently comprises a PEG4 group. In some embodiments, each of L¹, L², and L³ independently comprises a plurality of PEG4 groups.

[0232] In some embodiments, M comprises an alkylene, alkenylene, alkynylene, heteroalkylene, or haloalkylene group. In an embodiment, M comprises an ester, amide, disulfide, ether, carbonate, aryl, heteroaryl, cycloalkyl, or heterocyclyl group. In an embodiment, M is cleavable or non-cleavable.

[0233] In some embodiments, the ASGPR binding moiety comprises a structure of Formula (III-c):

[chemical structure]

or a salt thereof, wherein each of R^{2a}, R^{2b} R³, R⁴, R⁵, and subvariables thereof are as defined for Formula (I), each of L¹, L², and L³ is independently a linker, and M is a linker, wherein “ [symbol] ” represents an attachment point to a branching point, additional linker, or TREM, e.g., a linker, a nucleobase, internucleotide linkage, or terminus within the TREM sequence.

[0234] In some embodiments, each of R³, R⁴, and R⁵ are independently hydrogen or alkyl (e.g., CH₃). In some embodiments, R^{2a} is hydrogen. In some embodiments, R^{2b} is C(O)CH₃.

[0235] In an embodiment, each of L¹, L², and L³ independently comprises an alkylene, alkenylene, alkynylene, heteroalkylene, or haloalkylene group. In an embodiment, each of L¹, L², and L³ independently comprises an ester, amide, disulfide, ether, carbonate, aryl, heteroaryl, cycloalkyl, or heterocyclyl group. In an embodiment, each of L¹, L², and L³ independently is cleavable or non-cleavable. In an embodiment, each of L¹ and L² independently is cleavable or non-cleavable. In some embodiments, each of L¹, L², and L³ independently comprises a polyethylene glycol group (e.g., PEG1, PEG2, PEG3, PEG4, PEG5, PEG6, PEG7, PEG8, PEG10, PEG12, PEG14, PEG16, PEG18, PEG20, PEG24, PEG28, PEG32, PEG100, PEG200, PEG250, PEG500, PEG600, PEG700, PEG750, PEG800, PEG900, PEG1000, PEG2000, or PEG3000). In some embodiments, each of L¹, L², and L³ independently comprises a PEG1, PEG2, PEG3, PEG4, PEG5, or PEG6 group. In some embodiments, each of L¹, L², and L³ independently comprises a plurality of PEG1, PEG2, PEG3, PEG4, PEG5, or PEG6 groups (e.g., 2, 3, 4, or 5 PEG1, PEG2, PEG3, PEG4, PEG5, or PEG6 groups). In some embodiments, each of L¹, L², and L³ independently comprises a PEG2 group. In some embodiments, each of L¹, L², and L³ independently comprises a plurality of PEG2 groups. In some embodiments, each of L¹, L², and L³ independently comprises a PEG3 group. In some embodiments, each of L¹, L², and L³ independently comprises a plurality of PEG3 groups. In some embodiments, each of L¹, L², and L³ independently comprises a PEG4 group. In some embodiments, each of L¹, L², and L³ independently comprises a plurality of PEG4 groups.

[0236] In some embodiments, M comprises an alkylene, alkenylene, alkynylene, heteroalkylene, or haloalkylene group. In an embodiment, M comprises an ester, amide, disulfide, ether, carbonate, aryl, heteroaryl, cycloalkyl, or heterocyclyl group. In an embodiment, M is cleavable or non-cleavable.

[0237] In some embodiments, the ASGPR binding moiety comprises a compound selected from:

[chemical structure]

[chemical structure]

[chemical structure]

[chemical structure]

[chemical structure]

[0238] In some embodiments, the ASGPR binding moiety is a compound (X-i). In some embodiments, the ASGPR binding moiety is compound (X-ii). In some embodiments, the ASGPR binding moiety is compound (X-iii). In some embodiments, the ASGPR binding moiety is compound (X-iv). In some embodiments, the ASGPR binding moiety is compound (X-v). In some embodiments, the ASGPR binding moiety is compound (X-vi). In some embodiments, the ASGPR binding moiety is compound (X-vii). In some embodiments, the ASGPR binding moiety is compound (X-viii). In some embodiments, the ASGPR binding moiety is compound (X-ix). In some embodiments, the ASGPR binding moiety is compound (X-x). In some embodiments, the ASGPR binding moiety is compound (X-xi). In some embodiments, the ASGPR binding moiety is compound (X-xii). In some embodiments, the ASGPR binding moiety is compound (X-xiii). In some embodiments, the ASGPR binding moiety is compound (X-xiv). In some embodiments, the ASGPR binding moiety is compound (X-xv). In some embodiments, the ASGPR binding moiety is compound (X-xvi). In some embodiments, the ASGPR binding moiety is compound (X-xvii). In some embodiments, the ASGPR binding moiety is compound (X-xviii). In some embodiments, the ASGPR binding moiety is compound (X-xix). In some embodiments, the ASGPR binding moiety is compound (X-xx). In some embodiments, the ASGPR binding moiety is compound (X-xxi). In some embodiments, the ASGPR binding moiety is compound (X-xxii). In some embodiments, the ASGPR binding moiety is compound (X-xxiii). In some embodiments, the ASGPR binding moiety is a compound selected from compound (X-i), (X-xxii), and (X-xxii).

[0239] In some embodiments, the ASGPR binding moiety comprises a linker comprising a cyclic moiety, such as a pyrroline ring. In an embodiment, the ASGPR binding moiety comprises a structure of Formula (CII):

[chemical structure]

or a salt thereof, wherein E is absent or C(O), C(O)O, C(O)NH, C(S), C(S)NH, SO, SO₂, or SO₂NH; R¹¹, R¹², R¹³, R¹⁴, R¹⁵, R¹⁶, R¹⁷, and R¹⁸ are each independently for each occurrence H, —CH₂OR^{a}, or OR^{b}; R^{a} and R^{b} are each independently for each occurrence hydrogen, a hydroxyl protecting group, optionally substituted alkyl, optionally substituted aryl, optionally substituted cycloalkyl, optionally substituted aralkyl, optionally substituted alkenyl, optionally substituted heteroaryl, polyethyleneglycol (PEG), a phosphate, a diphosphate, a triphosphate, a phosphonate, a phosphonothioate, a phosphonodithioate, a phosphorothioate, a phosphorothiolate, a phosphorodithioate, a phosphorothiolothionate, a phosphodicster, a phosphotricster, an activated phosphate group, an activated phosphite group, a phosphoramidite, a solid support, —P(Z¹)(Z²)—O-nucleoside, —P(Z¹)(Z²)—O-oligonucleotide, —P(Z¹)(O-linker-R^{L})—O-nucleoside, or —P(Z¹)(O-linker-R^{L})—O-oligonucleotide; R³⁰ is independently for each occurrence-linker-R^{L} or R³¹; R^{L} is hydrogen or a ligand; R³¹ is —C(O)CH(N(R³²)₂)(CH₂)ₕN(R³²)₂; R³² is independently for each occurrence H, —R^{L}, -linker-R^{L} or R³¹; Z¹ is independently for each occurrence O or S; Z² is independently for each occurrence O, S, N (alkyl) or optionally substituted alkyl; and h is independently for each occurrence 1-20.

[0240] In some embodiments, the compound of Formula (CII) is selected from:

[chemical structure]

[0241] In some embodiments, the ASGPR binding moiety is a compound or substructure disclosed in U.S. Pat. No. 8,106,022, which is incorporated herein by reference in its entirety.

[0242] In some embodiments, the ASGPR binding moiety is a compound (CII-i). In some embodiments, the ASGPR binding moiety is a compound (CII-ii). In some embodiments, the ASGPR binding moiety is a compound (CII-iii). In some embodiments, the ASGPR binding moiety is a compound (CII-iv). In some embodiments, the ASGPR binding moiety is a compound (CII-v). In some embodiments, the ASGPR binding moiety is a compound (CII-vi).

[0243] In some embodiments, the ASGPR binding moiety is a compound of Formula (C-1), (C-2), (C-3) or (C4):

[chemical structure]

or a pharmaceutically acceptable salt thereof, wherein: n is 1, 2, or 3; W is absent or a peptide; L is -(T-Q-T-Q)ₘ-, wherein each T is independently absent or is (C₁-C₁₀) alkylene, (C₂-C₁₀) alkenylene, or (C₂-C₁₀) alkynylene, wherein one or more carbon groups of said T may each independently be replaced with a heteroatom group independently selected from —O—, —S—, and —N(R⁴)— wherein the heteroatom groups are separated by at least 2 carbon atoms, and wherein alkylene, alkenylene, and alkynylene may each be independently substituted with one or more halo atoms; each Q is independently absent or is C(O), C(O)—NR⁴, NR⁴—C(O), O—C(O)—NR⁴, NR⁴—C(O)—O, —CH₂—, a heteroaryl, or a heteroatom group selected from O, S, S—S, S(O), S(O)₂, and NR⁴, wherein at least two carbon atoms separate the heteroatom groups O, S, S—S, S(O), S(O)₂ and NR⁴ from any other heteroatom group; each R⁴ is independently —H, —(C₁-C₂₀)alkyl, or (C₃-C₈)cycloalkyl wherein one to six —CH₂— groups of the alkyl or cycloalkyl separated by at least two carbon atoms may be replaced with —O—, —S—, or —N(R⁴)—, and —CH₃— of the alkyl may each be independently replaced with a heteroatom group selected from —N(R⁴)₂, —OR⁴, and —S(R⁴) wherein the heteroatom groups are separated by at least 2 carbon atoms; and wherein the alkyl and cycloalkyl may be substituted with halo atoms; and m is independently 0, 1, 2, 3, 4, 5, 6, 7, 8, 9, 10, 11, 12, 13, 14, 15, 16, 17, 18, 19, 20, 21, 22, 23, 24, 25, 26, 27, 28, 29, 30, 31, 32, 33, 34, 35, 36, 37, 38, 39, or 40.

[0244] In some embodiments, the ASGPR binding moiety is a compound (C-1). In some embodiments, the ASGPR binding moiety is a compound (C-2). In some embodiments, the ASGPR binding moiety is a compound (C-3). In some embodiments, the ASGPR binding moiety is a compound (C-4).

[0245] In some embodiments, the compound of Formula (C-1), (C-2), (C-3) or (C4) comprises:

[chemical structure]

wherein n′ is 1 or 2 or a pharmaceutically acceptable salt thereof.

[0246] In some embodiments, the ASGPR binding moiety is a compound of Formula (E):

[chemical structure]

or a pharmaceutically acceptable salt thereof, wherein: n is i, 2 or 3; W is absent or is a peptide; L is -(T-Q-T-Q)ₘ-, wherein each T is independently absent or is (C₁-C₁₀) alkylene, (C₂-C₁₀) alkenylene, or (C2-C10) alkynylene, wherein one or more carbon groups of said T may each independently be replaced with a heteroatom group independently selected from —O—, —S—, and —N(R⁴)— wherein the heteroatom groups are separated by at least 2 carbon atoms, wherein said alkylene, alkenylene, alkynylene, may each independently be substituted by one or more halo atoms; each Q is independently absent or is C(O), C(0)-R⁴, R⁴—C(O), O—C(O)—R⁴, R⁴—C(O)—O, —CH₂—, a heteroaryl, or a heteroatom group selected from O, S, S—S, S(O), S(0)₂, and NR⁴, wherein at least two carbon atoms separate the heteroatom groups O, S, S—S, S(O), S(0)₂ and NR⁴ from any other heteroatom group; each R⁴ is independently —H, —(C₁-C2₀)alkyl, —(C₁-C₂₀)alkenyl, —(C₂-C₂₀) alkynyl, or (C₃-C₆) cycloalkyl wherein one to six —CH₂— groups of the alkyl or cycloalkyl separated by at least two carbon atoms may be replaced with —O—, —S—, or —N(R⁴)—, and —CH₃ of the alkyl may be replaced with a heteroatom group selected from —N(R⁴)₂, —OR⁴, and —S(R⁴) wherein the heteroatom groups are separated by at least 2 carbon atoms; and wherein the alkyl, alkenyl, alkynyl, and cycloalkyl may be substituted with halo atoms; each m is independently 0, 1, 2, 3, 4, 5, 6, 7, 8, 9, 10,11, 12,13, 14, 15, 16, 17, 18, 19, 20, 21, 22, 23, 24, 25, 26, 27, 28, 29, 30, 31, 32, 33, 34, 35, 36, 37, 38, 39, or 40.

[0247] In some embodiments, the compound of Formula (E) is selected from:

[chemical structure]

or a pharmaceutically acceptable salt thereof, and Y is as defined in Formula (E).

[0248] In some embodiments. n is 1. In some embodiments, n is 2. In some embodiments, n is 3.

[0249] In some embodiments of a compound of Formula (E), the compound is:

[chemical structure]

or a pharmaceutically acceptable salt thereof.

[0250] In some embodiments, the ASGPR binding moiety is a compound or substructure disclosed in WO2017/083368, which is incorporated herein by reference in its entirety.

[0251] In other embodiments, the ASGPR binding moiety is selected from:

[chemical structure]

[chemical structure]

wherein one of X or Y is a branching point, a linker, or a TREM, e.g., a linker, a nucleobase, internucleotide linkage, or terminus within the TREM sequence, and the other of X and Y is hydrogen.

[0252] In an embodiment, the ASGPR binding moiety comprises a structure of Formula (XII-a):

[chemical structure]

[0253] In an embodiment, the ASGPR binding moiety is a compound or substructure disclosed in Nucleic Acids (2016) 5:e317 or WO2015/042447, each of which is incorporated herein by reference in its entirety.

[0254] In some embodiments, the ASGPR binding moiety comprises a structure of Formula (V-a):

[chemical structure]

wherein n is an integer from 1 to 20. In some embodiments, the compound of Formula (V-a) is selected from:

[chemical structure]

wherein Z is an oligomeric compound, e.g., a linker or a nucleobase within the ASt of a TREM.

[0255] In another embodiment, the ASGPR binding moiety comprises a structure of Formula (V-b):

[chemical structure]

wherein A is O or S, A′ is O, S, or NH, and Z is an oligomeric compound, e.g., a linker or a TREM, e.g., a linker, a nucleobase, internucleotide linkage, or terminus within the TREM sequence.

[0256] In some embodiments, the ASGPR binding moiety comprises

[chemical structure]

[0257] In some embodiments, the ASGPR binding moiety is selected from:

[chemical structure]

[chemical structure]

[0258] In an embodiment, the ASGPR binding moiety is a compound or substructure disclosed in WO 2017/156012, which is incorporated herein by reference in its entirety.

[0259] In some embodiments, a hydroxyl group within an ASGPR binding moiety is protected, for example, with an acetyl or acetonide moiety. In some embodiments, a hydroxyl group within an ASGPR binding moiety is protected with an acetyl group. In some embodiments, a hydroxyl group within an ASGPR binding moiety is protected with acetonide group. For example, 1, 2, 3, 4, 5, 6, 7, 8, 9, 10, 11, 12, or more hydroxyl groups within an ASGPR binding moiety may be protected, e.g., with an acetyl group or an acetonide group. In some embodiments, all of the hydroxyl groups with in an ASGPR binding moiety are protected.

[0260] In some embodiments, the ASGPR binding moiety is bound to the 2′ or 4′ positions on the sugar moiety (e.g., ribose moiety) within a nucleotide of the TREM. In an embodiment, the ASGPR moiety is bound to a carbon atom at the 2′ or 4′ position. In an embodiment, the ASGPR moiety is bound to an oxygen atom at the 2′ or 4′ position. In an embodiment, the ASGPR is bound through a linker to the 2′ or 4′ position on the sugar moiety. Methods for installing an ASGPR moiety at the 4′-ribose position may carried out based on protocols described in, e.g., Liczner et al. (2021) Beilstein J. Org Chem 17:908-931, which is incorporated herein by reference in its entirety.

[0261] Exemplary TREMs comprising an ASGPR binding moiety may have a binding affinity for an ASGPR of between 0.01 nM to 100 mM. In some embodiments, a TREM comprising an ASGPR binding moiety has a binding affinity of less than 10 mM, e.g., 7.5 mM, 5 mM, 2.5 mM, 1 mM, 0.75 mM, 0.5 mM, 0.25 mM, 0.1 mM, 75 nM, 50 nM, 25 nM, 10 nM, 5 nM, or less.

[0262] Exemplary TREMs comprising an ASGPR binding moiety may be internalized into a cell, e.g., a hepatocyte. In some embodiments, a TREM comprising an ASGPR binding moiety has an increased uptake into a cell compared with a TREM that does not comprise an ASGPR binding moiety. For example, a TREM comprising an ASGPR binding moiety may be internalized into a cell more than 1.1, 1.2, 1.3, 1.4, 1.5, 1.75, 2, 3, 4, 5, 6, 7, 8, 9, 10, 15, 20, 25, 30, 35, 40, 45, 50, 75, 100 times or more than a TREM that does not comprise an ASGPR binding moiety.

[0263] Additional exemplary ASGPR moieties are described in further detail in U.S. Pat. Nos. 8,828,956; 9,867,882; 10,450,568; 10,808,246; U.S. Patent Publication Nos. 2015/0246133; 2015/0203843; and 2012/0095200; and PCT Publication Nos. WO 2013/166155, 2012/030683, and 2013/166121, each of which are incorporated herein by reference in its entirety.

### ASGPR Linkers

[0264] The ASGPR binding moiety comprises at least one linker that connects the carbohydrate to the TREM. In some embodiments, the TREM is connected to one or more carbohydrates (e.g., GalNAc moieties, e.g., of Formula (I)), through a linker as described herein. The linker may be monovalent or multivalent, e.g., bivalent, trivalent, tetravalent, or pentavalent. In some embodiments, the linker comprises a structure selected from:

[chemical structure]

wherein q2A, q2B, q3A, q3B, q4A, q4B, q5A, q5B and q5C represent independently for each occurrence 0-20 and wherein the repeating unit can be the same or different; P^{2A}, P^{2B}, p^{3A}, p^{3B}, P^{4A}, p^{4B}, p^{5A}, P^{5B}, P^{5C}, T^{2A}, T^{2B}, T^{3A}, T^{3B}, T^{4A}, T^{4B}, T^{4A}, T^{5B}, T^{5C} are each independently for each occurrence absent, CO, NH, O, S, OC(O), NHC(O), CH₂, CH₂NH or CH₂O; Q^{2A}, Q^{2B}, Q^{3A}, Q^{3B}, Q^{4A}, Q^{4B}, Q^{5A}, Q^{5B}, Q^{5C} are independently for each occurrence absent, alkylene, substituted alkylene wherein one or more methylenes can be interrupted or terminated by one or more of O, S, S(O), SO₂, N(R^{N}), C(R′)═C(R″), C≡C or C(O); R^{2A}, R^{2B}, R^{3A}, R^{3B}, R^{4A}, R^{4B}, R^{5A}, R^{5B}, R^{5C} are each independently for each occurrence absent, NH, O, S, CH₂, C(O)O, C(O)NH, NHCH(R^{a})C(O), —C(O)—CH(R^{a})—NH—, CO, CH═N—O,

[chemical structure]

or heterocyclyl; L^{2A}, L^{2B}, L^{3A}, L^{3B}, L^{4A}, L^{4B}, L^{5A}, L^{5B} and L^{5C} represent the ligand; i.e. each independently for each occurrence a monosaccharide (such as GalNAc), disaccharide, trisaccharide, tetrasaccharide, oligosaccharide, or polysaccharide; and R^{a} is H or amino acid side chain.

[0265] In some embodiments, the linker comprises:

[chemical structure]

wherein L^{5A}, L^{5B} and L^{5C} represent a monosaccharide, such as GalNAc derivative, e.g., as described herein.

[0266] A cleavable linking group is one which is sufficiently stable outside the cell, but which upon entry into a target cell is cleaved to release the two parts the linker is holding together. In a preferred embodiment, the cleavable linking group is cleaved at least about 10 times, 20, times, 30 times, 40 times, 50 times, 60 times, 70 times, 80 times, 90 times or more, or at least about 100 times faster in a target cell or under a first reference condition (which can, e.g., be selected to mimic or represent intracellular conditions) than in the blood of a subject, or under a second reference condition (which can, e.g., be selected to mimic or represent conditions found in the blood or serum).

[0267] Cleavable linking groups are susceptible to cleavage agents, e.g., pH, redox potential or the presence of degradative molecules. Generally, cleavage agents are more prevalent or found at higher levels or activities inside cells than in serum or blood. Examples of such degradative agents include: redox agents which are selected for particular substrates or which have no substrate specificity, including, e.g., oxidative or reductive enzymes or reductive agents such as mercaptans, present in cells, that can degrade a redox cleavable linking group by reduction; esterases; endosomes or agents that can create an acidic environment, e.g., those that result in a pH of five or lower; enzymes that can hydrolyze or degrade an acid cleavable linking group by acting as a general acid, peptidases (which can be substrate specific), and phosphatases. A cleavable linkage group, such as a disulfide bond can be susceptible to pH. The pH of human serum is 7.4, while the average intracellular pH is slightly lower, ranging from about 7.1-7.3. Endosomes have a more acidic pH, in the range of 5.5-6.0, and lysosomes have an even more acidic pH at around 5.0. Some linkers will have a cleavable linking group that is cleaved at a preferred pH, thereby releasing a cationic lipid from the ligand inside the cell, or into the desired compartment of the cell.

[0268] A linker can include a cleavable linking group that is cleavable by a particular enzyme. The type of cleavable linking group incorporated into a linker can depend on the cell to be targeted. For example, a liver-targeting ligand can be linked to a cationic lipid through a linker that includes an ester group. Liver cells are rich in esterases, and therefore the linker will be cleaved more efficiently in liver cells than in cell types that are not esterase-rich. Other cell-types rich in esterases include cells of the lung, renal cortex, and testis. Linkers that contain peptide bonds can be used when targeting cell types rich in peptidases, such as liver cells and synoviocytes.

[0269] In general, the suitability of a candidate cleavable linking group can be evaluated by testing the ability of a degradative agent (or condition) to cleave the candidate linking group. It will also be desirable to also test the candidate cleavable linking group for the ability to resist cleavage in the blood or when in contact with other non-target tissue. Thus, one can determine the relative susceptibility to cleavage between a first and a second condition, where the first is selected to be indicative of cleavage in a target cell and the second is selected to be indicative of cleavage in other tissues or biological fluids, e.g., blood or serum. The evaluations can be carried out in cell free systems, in cells, in cell culture, in organ or tissue culture, or in whole animals. It can be useful to make initial evaluations in cell-free or culture conditions and to confirm by further evaluations in whole animals. In preferred embodiments, useful candidate compounds are cleaved at least about 2, 4, 10, 20, 30, 40, 50, 60, 70, 80, 90, or about 100 times faster in the cell (or under in vitro conditions selected to mimic intracellular conditions) as compared to blood or serum (or under in vitro conditions selected to mimic extracellular conditions).

[0270] In one embodiment, a cleavable linking group is a redox cleavable linking group that is cleaved upon reduction or oxidation. An example of reductively cleavable linking group is a disulphide linking group (—S—S—). To determine if a candidate cleavable linking group is a suitable “reductively cleavable linking group,” or for example is suitable for use with a particular TREM moiety and particular targeting agent one can look to methods described herein. For example, a candidate can be evaluated by incubation with dithiothreitol (DTT), or other reducing agent using reagents know in the art, which mimic the rate of cleavage which would be observed in a cell, e.g., a target cell. The candidates can also be evaluated under conditions which are selected to mimic blood or scrum conditions. In one, candidate compounds arc cleaved by at most about 10% in the blood. In other embodiments, useful candidate compounds are degraded at least about 2, 4, 10, 20, 30, 40, 50, 60, 70, 80, 90, or about 100 times faster in the cell (or under in vitro conditions selected to mimic intracellular conditions) as compared to blood (or under in vitro conditions selected to mimic extracellular conditions). The rate of cleavage of candidate compounds can be determined using standard enzyme kinetics assays under conditions chosen to mimic intracellular media and compared to conditions chosen to mimic extracellular media.

[0271] In another embodiment, a cleavable linker comprises a phosphate-based cleavable linking group. A phosphate-based cleavable linking group is cleaved by agents that degrade or hydrolyze the phosphate group. An example of an agent that cleaves phosphate groups in cells are enzymes such as phosphatases in cells. Examples of phosphate-based linking groups are —O—P(O)(ORk)-O—, —O—P(S)(ORk)-O—, —O—P(S)(SRk)-O—, —S—P(O)(ORk)-O—, —O—P(O)(ORk)-S—, —S—P(O)(ORk)-S—, —O—P(S)(ORk)-S—, —S—P(S)(ORk)-O—, —O—P(O)(Rk)-O—, —O—P(S)(Rk)-O—, —S—P(O)(Rk)-O—, —S—P(S)(Rk)-O—, —S—P(O)(Rk)-S—, —O—P(S)(Rk)-S—. Preferred embodiments are —O—P(O)(OH)—O—, —O—P(S)(OH)—O—, —O—P(S)(SH)—O—, —S—P(O)(OH)—O—, —O—P(O)(OH)—S—, —S—P(O)(OH)—S—, —O—P(S)(OH)—S—, —S—P(S)(OH)—O—, —O—P(O)(H)—O—, —O—P(S)(H)—O—, —S—P(O)(H)—O, —S—P(S)(H)—O—, —S—P(O)(H)—S—, —O—P(S)(H)—S—. A preferred embodiment is —O—P(O)(OH)—O—. These candidates can be evaluated using methods analogous to those described above.

[0272] In another embodiment, a cleavable linker comprises an acid cleavable linking group. An acid cleavable linking group is a linking group that is cleaved under acidic conditions. In preferred embodiments acid cleavable linking groups are cleaved in an acidic environment with a pH of about 6.5 or lower (e.g., about 6.0, 5.75, 5.5, 5.25, 5.0, or lower), or by agents such as enzymes that can act as a general acid. In a cell, specific low pH organelles, such as endosomes and lysosomes can provide a cleaving environment for acid cleavable linking groups. Examples of acid cleavable linking groups include but are not limited to hydrazones, esters, and esters of amino acids. Acid cleavable groups can have the general formula —C═NN—, C(O)O, or —OC(O). A preferred embodiment is when the carbon attached to the oxygen of the ester (the alkoxy group) is an aryl group, substituted alkyl group, or tertiary alkyl group such as dimethyl pentyl or t-butyl. These candidates can be evaluated using methods analogous to those described above.

[0273] In another embodiment, a cleavable linker comprises an ester-based cleavable linking group. An ester-based cleavable linking group is cleaved by enzymes such as esterases and amidases in cells. Examples of ester-based cleavable linking groups include but are not limited to esters of alkylene, alkenylene and alkynylene groups. Ester cleavable linking groups have the general formula —C(O)O—, or —OC(O)—. These candidates can be evaluated using methods analogous to those described above.

[0274] In yet another embodiment, a cleavable linker comprises a peptide-based cleavable linking group. A peptide-based cleavable linking group is cleaved by enzymes such as peptidases and proteases in cells. Peptide-based cleavable linking groups are peptide bonds formed between amino acids to yield oligopeptides (e.g., dipeptides, tripeptides etc.) and polypeptides. Peptide-based cleavable groups do not include the amide group (—C(O)NH—). The amide group can be formed between any alkylene, alkenylene or alkynelene. A peptide bond is a special type of amide bond formed between amino acids to yield peptides and proteins. The peptide based cleavage group is generally limited to the peptide bond (i.e., the amide bond) formed between amino acids yielding peptides and proteins and does not include the entire amide functional group. Peptide-based cleavable linking groups have the general formula-NHCHRAC(O)NHCHRBC(O)— (SEQ ID NO: 13), where RA and RB are the R groups of the two adjacent amino acids. These candidates can be evaluated using methods analogous to those described above.

[0275] The ASGPR binding moiety may be bound to a sugar at any nucleotide position within the acceptor stem domain (ASt Domain1 and/or ASt Domain2). In an embodiment, the ASGPR binding moiety is bound to any carbon atom within a sugar in the acceptor stem domain (ASt Domain1 and/or ASt Domain2). In an embodiment, the ASGPR binding moiety is bound to any nitrogen atom within a sugar in the acceptor stem domain (ASt Domain1 and/or ASt Domain2). In an embodiment, the ASGPR binding moiety is bound to any oxygen atom within a sugar in the acceptor stem domain (ASt Domain1 and/or ASt Domain2). In an embodiment, the ASGPR binding moiety is bound to any sulfur atom within a sugar in the acceptor stem domain (ASt Domain1 and/or ASt Domain2). In an embodiment, the ASGPR binding moiety is bound to any phosphorus atom within a sugar in the acceptor stem domain (ASt Domain1 and/or ASt Domain2).

[0276] The ASGPR binding moiety may be bound to the phosphate backbone at any nucleotide position within the acceptor stem domain (ASt Domain1 and/or ASt Domain2). In an embodiment, the ASGPR binding moiety is bound to an oxygen atom within the phosphate backbone within the acceptor stem domain (ASt Domain1 and/or ASt Domain2). In an embodiment, ASGPR binding moiety is bound to a phosphorus atom in phosphate backbone within the acceptor stem domain (ASt Domain1 and/or ASt Domain2). In an embodiment, it is bound to a nitrogen atom in the phosphate backbone within the acceptor stem domain (ASt Domain1 and/or ASt Domain2).

[0277] In an embodiment, the ASGPR binding moiety is bound to a sugar at TREM position 1 (G). In an embodiment, the ASGPR binding moiety is bound to a sugar at TREM position 2 (G). In an embodiment, the ASGPR binding moiety is bound to a sugar at TREM position 3 (C). In an embodiment, the ASGPR binding moiety is bound to a sugar at TREM position 4 (U). In an embodiment, the ASGPR binding moiety is bound to a sugar at TREM position 5 (C). In an embodiment, the ASGPR binding moiety is bound to a sugar at TREM position 6 (C). In an embodiment, the ASGPR binding moiety is bound to a sugar at TREM position 7 (G). In an embodiment, the ASGPR binding moiety is bound to a sugar at TREM position 8 (U). In an embodiment, the ASGPR binding moiety is bound to a sugar at TREM position 9 (G).

[0278] In an embodiment, the ASGPR binding moiety is bound to the phosphate backbone at TREM position 1 (G). In an embodiment, the ASGPR binding moiety is bound to the phosphate backbone at TREM position 2 (G). In an embodiment, the ASGPR binding moiety is bound to the phosphate backbone at TREM position 3 (C). In an embodiment, the ASGPR binding moiety is bound to the phosphate backbone at TREM position 4 (U). In an embodiment, the ASGPR binding moiety is bound to the phosphate backbone at TREM position 5 (C). In an embodiment, the ASGPR binding moiety is bound to the phosphate backbone at TREM position 6 (C). In an embodiment, the ASGPR binding moiety is bound to the phosphate backbone at TREM position 7 (G). In an embodiment, the ASGPR binding moiety is bound to the phosphate backbone at TREM position 8 (U). In an embodiment, the ASGPR binding moiety is bound to the phosphate backbone at TREM position 9 (G).

[0279] In an embodiment, the ASGPR binding moiety is bound to a sugar moiety (e.g., ribose moiety) at TREM position 76 (A). In an embodiment, the ASGPR binding moiety is bound to a sugar moiety (e.g., ribose moiety) at TREM position 75 (C). In an embodiment, the ASGPR binding moiety is bound to a sugar moiety (e.g., ribose moiety) at TREM position 74 (C). In an embodiment, the ASGPR binding moiety is bound to a sugar moiety (e.g., ribose moiety) at TREM position 73 (G). In an embodiment, the ASGPR binding moiety is bound to a sugar moiety (e.g., ribose moiety) at TREM position 72 (C). In an embodiment, the ASGPR binding moiety is bound to a sugar moiety (e.g., ribose moiety) at TREM position 71 (U). In an embodiment, the ASGPR binding moiety is bound to a sugar moiety (e.g., ribose moiety) at TREM position 70 (G). In an embodiment, the ASGPR binding moiety is bound to a sugar moiety (e.g., ribose moiety) at TREM position 69 (A). In an embodiment, the ASGPR binding moiety is bound to a sugar moiety (e.g., ribose moiety) at TREM position 68 (G). In an embodiment, the ASGPR binding moiety is bound to a sugar moiety (e.g., ribose moiety) at TREM position 67 (G). In an embodiment, the ASGPR binding moiety is bound to a sugar moiety (e.g., ribose moiety) at TREM position 66 (C). In an embodiment, the ASGPR binding moiety is bound to a sugar moiety (e.g., ribose moiety) at TREM position 65 (G).

[0280] In an embodiment, the ASGPR binding moiety is bound to the phosphate backbone at TREM position 76 (A). In an embodiment, the ASGPR binding moiety is bound to the phosphate backbone at TREM position 75 (C). In an embodiment, the ASGPR binding moiety is bound to the phosphate backbone at TREM position 74 (C). In an embodiment, the ASGPR binding moiety is bound to the phosphate backbone at TREM position 73 (G). In an embodiment, the ASGPR binding moiety is bound to the phosphate backbone at TREM position 72 (C). In an embodiment, the ASGPR binding moiety is bound to the phosphate backbone at TREM position 71 (U). In an embodiment, the ASGPR binding moiety is bound to the phosphate backbone at TREM position 70 (G). In an embodiment, the ASGPR binding moiety is bound to the phosphate backbone at TREM position 69 (A). In an embodiment, the ASGPR binding moiety is bound to the phosphate backbone at TREM position 68 (G). In an embodiment, the ASGPR binding moiety is bound to the phosphate backbone at TREM position 67 (G). In an embodiment, the ASGPR binding moiety is bound to the phosphate backbone at TREM position 66 (C). In an embodiment, the ASGPR binding moiety is bound to the phosphate backbone at TREM position 65 (G).

[0281] The ASGPR binding moiety may be bound to any nucleotide position within a domain (ASt Domain1, DH Domain, ACH Domain, VL Domain, TH Domain, and/or ASt Domain2) of a TREM. In an embodiment, the ASGPR moiety is bound to a nucleobase, terminus, or internucleotide linkage within a TREM. In an embodiment, the ASGPR binding moiety is bound to a nucleobase within a TREM. In an embodiment, the ASGPR binding moiety is bound to any adenine nucleobase within a domain (ASt Domain1, DH Domain, ACH Domain, VL Domain, TH Domain, and/or ASt Domain2) of the TREM. In an embodiment, ASGPR binding moiety is bound to any cytosine nucleobase within a domain (ASt Domain1, DH Domain, ACH Domain, VL Domain, TH Domain, and/or ASt Domain2) of the TREM. In an embodiment, it is bound to any guanosine nucleobase within a domain (ASt Domain1, DH Domain, ACH Domain, VL Domain, TH Domain, and/or ASt Domain2) of the TREM. In an embodiment, it is bound to any uracil nucleobase within a domain (ASt Domain1, DH Domain, ACH Domain, VL Domain, TH Domain, and/or ASt Domain2) of the TREM. In an embodiment, it is bound to any thymine nucleobase within a domain (ASt Domain1, DH Domain, ACH Domain, VL Domain, TH Domain, and/or ASt Domain2) of the TREM.

[0282] In an embodiment, the ASGPR binding moiety is present within a TREM at TREM position 1 (e.g., present within a nucleobase at TREM position 1). In an embodiment, the ASGPR binding moiety is present within a TREM at TREM position 2 (e.g., present within a nucleobase at TREM position 2). In an embodiment, the ASGPR binding moiety is present within a TREM at TREM position 3 (e.g., present within a nucleobase at TREM position 3). In an embodiment, the ASGPR binding moiety is present within a TREM at TREM position 4 (e.g., present within a nucleobase at TREM position 4). In an embodiment, the ASGPR binding moiety is present within a TREM at TREM position 5 (e.g., present within a nucleobase at TREM position 5). In an embodiment, the ASGPR binding moiety is present within a TREM at TREM position 6 (e.g., present within a nucleobase at TREM position 6). In an embodiment, the ASGPR binding moiety is present within a TREM at TREM position 7 (e.g., present within a nucleobase at TREM position 7). In an embodiment, the ASGPR binding moiety is present within a TREM at TREM position 8 (e.g., present within a nucleobase at TREM position 8). In an embodiment, the ASGPR binding moiety is present within a TREM at TREM position 9 (e.g., present within a nucleobase at TREM position 9).

[0283] In an embodiment, the ASGPR binding moiety is present within a TREM at TREM position 10 (e.g., present within a nucleobase at TREM position 10). In an embodiment, the ASGPR binding moiety is present within a TREM at TREM position 11 (e.g., present within a nucleobase at TREM position 11). In an embodiment, the ASGPR binding moiety is present within a TREM at TREM position 12 (e.g., present within a nucleobase at TREM position 12). In an embodiment, the ASGPR binding moiety is present within a TREM at TREM position 13 (e.g., present within a nucleobase at TREM position 13). In an embodiment, the ASGPR binding moiety is present within a TREM at TREM position 14 (e.g., present within a nucleobase at TREM position 14). In an embodiment, the ASGPR binding moiety is present within a TREM at TREM position 15 (e.g., present within a nucleobase at TREM position 15). In an embodiment, the ASGPR binding moiety is present within a TREM at TREM position 16 (e.g., present within a nucleobase at TREM position 16). In an embodiment, the ASGPR binding moiety is not present within a TREM at TREM position 16. In an embodiment, the ASGPR binding moiety is present within a TREM at TREM position 17 (e.g., present within a nucleobase at TREM position 17). In an embodiment, the ASGPR binding moiety is present within a TREM at TREM position 18 (e.g., present within a nucleobase at TREM position 18). In an embodiment, the ASGPR binding moiety is present within a TREM at TREM position 19 (e.g., present within a nucleobase at TREM position 19). In an embodiment, the ASGPR binding moiety is present within a TREM at TREM position 20 (e.g., present within a nucleobase at TREM position 20). In an embodiment, the ASGPR binding moiety is not present within a TREM at TREM position 20. In an embodiment, the ASGPR binding moiety is present within a TREM at TREM position 21 (e.g., present within a nucleobase at TREM position 21). In an embodiment, the ASGPR binding moiety is present within a TREM at TREM position 22 (e.g., present within a nucleobase at TREM position 22). In an embodiment, the ASGPR binding moiety is present within a TREM at TREM position 23 (e.g., present within a nucleobase at TREM position 23). In an embodiment, the ASGPR binding moiety is present within a TREM at TREM position 24 (e.g., present within a nucleobase at TREM position 24). In an embodiment, the ASGPR binding moiety is present within a TREM at TREM position 25 (e.g., present within a nucleobase at TREM position 25). In an embodiment, the ASGPR binding moiety is present within a TREM at TREM position 26 (e.g., present within a nucleobase at TREM position 26).

[0284] In an embodiment, the ASGPR binding moiety is present within a TREM at TREM position 27 (e.g., present within a nucleobase at TREM position 27). In an embodiment, the ASGPR binding moiety is present within a TREM at TREM position 28 (e.g., present within a nucleobase at TREM position 28). In an embodiment, the ASGPR binding moiety is present within a TREM at TREM position 29 (e.g., present within a nucleobase at TREM position 29). In an embodiment, the ASGPR binding moiety is present within a TREM at TREM position 30 (e.g., present within a nucleobase at TREM position 30). In an embodiment, the ASGPR binding moiety is present within a TREM at TREM position 31 (e.g., present within a nucleobase at TREM position 31). In an embodiment, the ASGPR binding moiety is present within a TREM at TREM position 32 (e.g., present within a nucleobase at TREM position 32). In an embodiment, the ASGPR binding moiety is present within a TREM at TREM position 33 (e.g., present within a nucleobase at TREM position 33). In an embodiment, the ASGPR binding moiety is present within a TREM at TREM position 34 (e.g., present within a nucleobase at TREM position 34). In an embodiment, the ASGPR binding moiety is present within a TREM at TREM position 35 (e.g., present within a nucleobase at TREM position 35). In an embodiment, the ASGPR binding moiety is present within a TREM at TREM position 36 (e.g., present within a nucleobase at TREM position 36). In an embodiment, the ASGPR binding moiety is present within a TREM at TREM position 37 (e.g., present within a nucleobase at TREM position 37). In an embodiment, the ASGPR binding moiety is present within a TREM at TREM position 38 (e.g., present within a nucleobase at TREM position 38). In an embodiment, the ASGPR binding moiety is present within a TREM at TREM position 39 (e.g., present within a nucleobase at TREM position 39). In an embodiment, the ASGPR binding moiety is present within a TREM at TREM position 40 (e.g., present within a nucleobase at TREM position 40). In an embodiment, the ASGPR binding moiety is present within a TREM at TREM position 41 (e.g., present within a nucleobase at TREM position 41). In an embodiment, the ASGPR binding moiety is present within a TREM at TREM position 42 (e.g., present within a nucleobase at TREM position 42). In an embodiment, the ASGPR binding moiety is present within a TREM at TREM position 43 (e.g., present within a nucleobase at TREM position 43).

[0285] In an embodiment, the ASGPR binding moiety is present within a TREM at TREM position 44 (e.g., present within a nucleobase at TREM position 44). In an embodiment, the ASGPR binding moiety is present within a TREM at TREM position 45 (e.g., present within a nucleobase at TREM position 45). In an embodiment, the ASGPR binding moiety is present within a TREM at TREM position 46 (e.g., present within a nucleobase at TREM position 46). In an embodiment, the ASGPR binding moiety is present within a TREM at TREM position 47 (e.g., present within a nucleobase at TREM position 47). In an embodiment, the ASGPR binding moiety is not present within a TREM at TREM position 47. In an embodiment, the ASGPR binding moiety is present within a TREM at TREM position 48 (e.g., present within a nucleobase at TREM position 48). In an embodiment, the ASGPR binding moiety is present within a TREM at TREM position 49 (e.g., present within a nucleobase at TREM position 49).

[0286] In an embodiment, the ASGPR binding moiety is present within a TREM at TREM position 50 (e.g., present within a nucleobase at TREM position 50). In an embodiment, the ASGPR binding moiety is present within a TREM at TREM position 51 (e.g., present within a nucleobase at TREM position 51). In an embodiment, the ASGPR binding moiety is present within a TREM at TREM position 52 (e.g., present within a nucleobase at TREM position 52). In an embodiment, the ASGPR binding moiety is present within a TREM at TREM position 53 (e.g., present within a nucleobase at TREM position 53). In an embodiment, the ASGPR binding moiety is present within a TREM at TREM position 54 (e.g., present within a nucleobase at TREM position 54). In an embodiment, the ASGPR binding moiety is present within a TREM at TREM position 55 (e.g., present within a nucleobase at TREM position 55). In an embodiment, the ASGPR binding moiety is present within a TREM at TREM position 56 (e.g., present within a nucleobase at TREM position 56). In an embodiment, the ASGPR binding moiety is present within a TREM at TREM position 57 (e.g., present within a nucleobase at TREM position 57). In an embodiment, the ASGPR binding moiety is present within a TREM at TREM position 58 (e.g., present within a nucleobase at TREM position 58). In an embodiment, the ASGPR binding moiety is present within a TREM at TREM position 59 (e.g., present within a nucleobase at TREM position 59). In an embodiment, the ASGPR binding moiety is present within a TREM at TREM position 60 (e.g., present within a nucleobase at TREM position 60). In an embodiment, the ASGPR binding moiety is present within a TREM at TREM position 61 (e.g., present within a nucleobase at TREM position 61). In an embodiment, the ASGPR binding moiety is present within a TREM at TREM position 62 (e.g., present within a nucleobase at TREM position 62). In an embodiment, the ASGPR binding moiety is present within a TREM at TREM position 63 (e.g., present within a nucleobase at TREM position 63). In an embodiment, the ASGPR binding moiety is present within a TREM at TREM position 64 (e.g., present within a nucleobase at TREM position 64).

[0287] In an embodiment, the ASGPR binding moiety is present within a TREM at TREM position 65 (e.g., present within a nucleobase at TREM position 65). In an embodiment, the ASGPR binding moiety is present within a TREM at TREM position 66 (e.g., present within a nucleobase at TREM position 66). In an embodiment, the ASGPR binding moiety is present within a TREM at TREM position 67 (e.g., present within a nucleobase at TREM position 67). In an embodiment, the ASGPR binding moiety is present within a TREM at TREM position 68 (e.g., present within a nucleobase at TREM position 68). In an embodiment, the ASGPR binding moiety is present within a TREM at TREM position 69 (e.g., present within a nucleobase at TREM position 69). In an embodiment, the ASGPR binding moiety is present within a TREM at TREM position 70 (e.g., present within a nucleobase at TREM position 70). In an embodiment, the ASGPR binding moiety is present within a TREM at TREM position 71 (e.g., present within a nucleobase at TREM position 71). In an embodiment, the ASGPR binding moiety is present within a TREM at TREM position 72 (e.g., present within a nucleobase at TREM position 72). In an embodiment, the ASGPR binding moiety is present within a TREM at TREM position 73 (e.g., present within a nucleobase at TREM position 73). In an embodiment, the ASGPR binding moiety is present within a TREM at TREM position 74 (e.g., present within a nucleobase at TREM position 74). In an embodiment, the ASGPR binding moiety is present within a TREM at TREM position 75 (e.g., present within a nucleobase at TREM position 75). In an embodiment, the ASGPR binding moiety is present within a TREM at TREM position 76 (e.g., present within a nucleobase at TREM position 76).

[0288] In an embodiment, the ASGPR binding moiety is bound to a nucleobase at TREM position 1 (G). In an embodiment, the ASGPR binding moiety is bound to a nucleobase at TREM position 2 (G). In an embodiment, the ASGPR binding moiety is bound to a nucleobase at TREM position 3 (C). In an embodiment, the ASGPR binding moiety is bound to a nucleobase at TREM position 4 (U). In an embodiment, the ASGPR binding moiety is bound to a nucleobase at TREM position 5 (C). In an embodiment, the ASGPR binding moiety is bound to a nucleobase at TREM position 6 (C). In an embodiment, the ASGPR binding moiety is bound to a nucleobase at TREM position 7 (G). In an embodiment, the ASGPR binding moiety is bound to a nucleobase at TREM position 8 (U). In an embodiment, the ASGPR binding moiety is bound to a nucleobase at TREM position 9 (G).

[0289] In an embodiment, the ASGPR binding moiety is bound to a nucleobase at TREM position 10 (G). In an embodiment, the ASGPR binding moiety is bound to a nucleobase at TREM position 11 (C). In an embodiment, the ASGPR binding moiety is bound to a nucleobase at TREM position 12 (G). In an embodiment, the ASGPR binding moiety is bound to a nucleobase at TREM position 13 (C). In an embodiment, the ASGPR binding moiety is bound to a nucleobase at TREM position 14 (A). In an embodiment, the ASGPR binding moiety is bound to a nucleobase at TREM position 15 (A). In an embodiment, the ASGPR binding moiety is bound to a nucleobase at TREM position 16 (U). In an embodiment, the ASGPR binding moiety is bound to a nucleobase at TREM position 17 (G). In an embodiment, the ASGPR binding moiety is bound to a nucleobase at TREM position 18 (G). In an embodiment, the ASGPR binding moiety is bound to a nucleobase at TREM position 19 (A). In an embodiment, the ASGPR binding moiety is bound to a nucleobase at TREM position 20 (U). In an embodiment, the ASGPR binding moiety is bound to a nucleobase at TREM position 21 (A). In an embodiment, the ASGPR binding moiety is bound to a nucleobase at TREM position 22 (G). In an embodiment, the ASGPR binding moiety is bound to a nucleobase at TREM position 23 (C). In an embodiment, the ASGPR binding moiety is bound to a nucleobase at TREM position 24 (G). In an embodiment, the ASGPR binding moiety is bound to a nucleobase at TREM position 25 (C). In an embodiment, the ASGPR binding moiety is bound to a nucleobase at TREM position 26 (A).

[0290] In an embodiment, the ASGPR binding moiety is bound to a nucleobase at TREM position 27 (U). In an embodiment, the ASGPR binding moiety is bound to a nucleobase at TREM position 28 (U). In an embodiment, the ASGPR binding moiety is bound to a nucleobase at TREM position 29 (G). In an embodiment, the ASGPR binding moiety is bound to a nucleobase at TREM position 30 (G). In an embodiment, the ASGPR binding moiety is bound to a nucleobase at TREM position 31 (A). In an embodiment, the ASGPR binding moiety is bound to a nucleobase at TREM position 32 (C). In an embodiment, the ASGPR binding moiety is bound to a nucleobase at TREM position 33 (U). In an embodiment, the ASGPR binding moiety is bound to a nucleobase at TREM position 34 (U). In an embodiment, the ASGPR binding moiety is bound to a nucleobase at TREM position 35 (C). In an embodiment, the ASGPR binding moiety is bound to a nucleobase at TREM position 36 (A). In an embodiment, the ASGPR binding moiety is bound to a nucleobase at TREM position 37 (A). In an embodiment, the ASGPR binding moiety is bound to a nucleobase at TREM position 38 (A). In an embodiment, the ASGPR binding moiety is bound to a nucleobase at TREM position 39 (U). In an embodiment, the ASGPR binding moiety is bound to a nucleobase at TREM position 40 (U). In an embodiment, the ASGPR binding moiety is bound to a nucleobase at TREM position 41 (C). In an embodiment, the ASGPR binding moiety is bound to a nucleobase at TREM position 42 (A). In an embodiment, the ASGPR binding moiety is bound to a nucleobase at TREM position 43 (A).

[0291] In an embodiment, the ASGPR binding moiety is bound to a nucleobase at TREM position 44 (A). In an embodiment, the ASGPR binding moiety is bound to a nucleobase at TREM position 45 (G). In an embodiment, the ASGPR binding moiety is bound to a nucleobase at TREM position 46 (G). In an embodiment, the ASGPR binding moiety is bound to a nucleobase at TREM position 47 (U). In an embodiment, the ASGPR binding moiety is bound to a nucleobase at TREM position 48 (U). In an embodiment, the ASGPR binding moiety is bound to a nucleobase at TREM position 49 (C)

[0292] In an embodiment, the ASGPR binding moiety is bound to a nucleobase at TREM position 50 (C). In an embodiment, the ASGPR binding moiety is bound to a nucleobase at TREM position 51 (G). In an embodiment, the ASGPR binding moiety is bound to a nucleobase at TREM position 52 (G). In an embodiment, the ASGPR binding moiety is bound to a nucleobase at TREM position 53 (G). In an embodiment, the ASGPR binding moiety is bound to a nucleobase at TREM position 54 (U). In an embodiment, the ASGPR binding moiety is bound to a nucleobase at TREM position 55 (U). In an embodiment, the ASGPR binding moiety is bound to a nucleobase at TREM position 56 (C). In an embodiment, the ASGPR binding moiety is bound to a nucleobase at TREM position 57 (G). In an embodiment, the ASGPR binding moiety is bound to a nucleobase at TREM position 58 (A). In an embodiment, the ASGPR binding moiety is bound to a nucleobase at TREM position 59 (G). In an embodiment, the ASGPR binding moiety is bound to a nucleobase at TREM position 60 (U). In an embodiment, the ASGPR binding moiety is bound to a nucleobase at TREM position 61 (C). In an embodiment, the ASGPR binding moiety is bound to a nucleobase at TREM position 62 (C). In an embodiment, the ASGPR binding moiety is bound to a nucleobase at TREM position 63 (C). In an embodiment, the ASGPR binding moiety is bound to a nucleobase at TREM position 64 (G).

[0293] In an embodiment, the ASGPR binding moiety is bound to a nucleobase at TREM position 76 (A). In an embodiment, the ASGPR binding moiety is bound to a nucleobase at TREM position 75 (C). In an embodiment, the ASGPR binding moiety is bound to a nucleobase at TREM position 74 (C). In an embodiment, the ASGPR binding moiety is bound to a nucleobase at TREM position 73 (G). In an embodiment, the ASGPR binding moiety is bound to a nucleobase at TREM position 72 (C). In an embodiment, the ASGPR binding moiety is bound to a nucleobase at TREM position 71 (U). In an embodiment, the ASGPR binding moiety is bound to a nucleobase at TREM position 70 (G). In an embodiment, the ASGPR binding moiety is bound to a nucleobase at TREM position 69 (A). In an embodiment, the ASGPR binding moiety is bound to a nucleobase at TREM position 68 (G). In an embodiment, the ASGPR binding moiety is bound to a nucleobase at TREM position 67 (G). In an embodiment, the ASGPR binding moiety is bound to a nucleobase at TREM position 66 (C). In an embodiment, the ASGPR binding moiety is bound to a nucleobase at TREM position 65 (G).

[0294] In an embodiment, the TREM comprising an ASGPR binding moiety comprises a ribonucleic acid (RNA) sequence encoded by a deoxyribonucleic acid (DNA) sequence disclosed in Table 1, e.g., any one of SEQ ID NOs: 1-451 disclosed in Table 1. In an embodiment the TREM comprising an ASGPR binding moiety comprises an RNA sequence at least 60%, 65%, 70%, 75%, 80%, 82%, 85%, 87%, 88%, 90%, 92%, 95%, 96%, 97%, 98%, or 99% identical to an RNA sequence encoded by a DNA sequence provided in Table 1, e.g., any one of SEQ ID NOs: 1-451 disclosed in Table 1. In an embodiment, the TREM comprising an ASGPR binding moiety comprises an RNA sequence encoded by a DNA sequence at least 60%, 65%, 70%, 75%, 80%, 82%, 85%, 87%, 88%, 90%, 92%, 95%, 96%, 97%, 98%, or 99% identical to a DNA sequence provided in Table 1, e.g., any one of SEQ ID NOs: 1-451 disclosed in Table 1.

[0295] In an embodiment, the TREM comprising an ASGPR binding moiety comprises at least 5, 10, 15, 20, 25, or 30 consecutive nucleotides of an RNA sequence encoded by a DNA sequence disclosed in Table 1, e.g., at least 5, 10, 15, 20, 25, or 30 consecutive nucleotides of an RNA sequence encoded by any one of SEQ ID NOs: 1-451 disclosed in Table 1. In an embodiment, the TREM comprising an ASGPR binding moiety comprises at least 5, 10, 15, 20, 25, or 30 consecutive nucleotides of an RNA sequence at least 60%, 65%, 70%, 75%, 80%, 82%, 85%, 87%, 88%, 90%, 92%, 95%, 96%, 97%, 98%, or 99% identical to an RNA sequence encoded by a DNA sequence provided in Table 1, e.g., any one of SEQ ID NOs: 1-451 disclosed in Table 1. In an embodiment, the TREM comprising an ASGPR binding moiety comprises at least 5, 10, 15, 20, 25, or 30 consecutive nucleotides of an RNA sequence encoded by a DNA sequence at least 60%, 65%, 70%, 75%, 80%, 82%, 85%, 87%, 88%, 90%, 92%, 95%, 96%, 97%, 98%, or 99% identical to a DNA sequence provided in Table 1, e.g., any one of SEQ ID NOs: 1-451 disclosed in Table 1.

[0296] In an embodiment, the TREM comprising an ASGPR binding moiety comprises at least 5%, 10%, 15%, 20%, 25%, 30%, 35%, 40%, 50%, 55%, 60%, 65%, 70%, 75%, 80%, 85%, 90%, 95%, 96%, 97%, 98% or 99% of an RNA sequence encoded by a DNA sequence provided in Table 1, e.g., any one of SEQ ID NOs: 1-451 disclosed in Table 1. In an embodiment, the TREM comprising an ASGPR binding moiety comprises at least 5%, 10%, 15%, 20%, 25%, 30%, 35%, 40%, 50%, 55%, 60%, 65%, 70%, 75%, 80%, 85%, 90%, 95%, 96%, 97%, 98% or 99% of an RNA sequence at least 80%, 85%, 90%, 95%, 96%, 97%, 98%, or 99% identical to an RNA sequence encoded by a DNA sequence provided in Table 1, e.g., any one of SEQ ID NOs: 1-451 disclosed in Table 1. In an embodiment, the TREM comprising an ASGPR binding moiety comprises at least 5%, 10%, 15%, 20%, 25%, 30%, 35%, 40%, 50%, 55%, 60%, 65%, 70%, 75%, 80%, 85%, 90%, 95%, 96%, 97%, 98% or 99% of an RNA sequence encoded by a DNA sequence at least 80%, 85%, 90%, 95%, 96%, 97%, 98%, or 99% identical to a DNA sequence provided in Table 1, e.g., any one of SEQ ID NOs: 1-451 disclosed in Table 1.

[0297] In an embodiment, the TREM comprising an ASGPR binding moiety comprises at least 5 ribonucleotides (nt), 10 nt, 15 nt, 20 nt, 25 nt, 30 nt, 35 nt, 40 nt, 45 nt, 50 nt, 55 nt or 60 nt (but less than the full length) of an RNA sequence encoded by a DNA sequence disclosed in Table 1, e.g., any one of SEQ ID NOs: 1-451 disclosed in Table 1. In an embodiment, the TREM comprising an ASGPR binding moiety comprises at least 5 ribonucleotides (nt), 10 nt, 15 nt, 20 nt, 25 nt, 30 nt, 35 nt, 40 nt, 45 nt, 50 nt, 55 nt or 60 nt (but less than the full length) of an RNA sequence which is at least 80%, 85%, 90%, 95%, 96%, 97%, 98%, 99% or 100% identical to an RNA sequence encoded by a DNA sequence provided in Table 1, e.g., any one of SEQ ID NOs: 1-451 disclosed in Table 1. In an embodiment, the TREM comprising an ASGPR binding moiety comprises at least 5 ribonucleotides (nt), 10 nt, 15 nt, 20 nt, 25 nt, 30 nt, 35 nt, 40 nt, 45 nt, 50 nt, 55 nt or 60 nt (but less than the full length) of an RNA sequence encoded by a DNA sequence with at least 80%, 82%, 85%, 87%, 88%, 90%, 92%, 95%, 96%, 97%, 98%, 99% or 100% identity to a DNA sequence provided in Table 1, e.g., any one of SEQ ID NOs: 1-451 disclosed in Table 1.

[0298] In an embodiment, the TREM comprising an ASGPR binding moiety comprises a ribonucleic acid (RNA) sequence encoded by a deoxyribonucleic acid (DNA) sequence disclosed in Table 4, e.g., any one of SEQ ID NOs: 452-561 disclosed in Table 4. In an embodiment the TREM comprising an ASGPR binding moiety comprises an RNA sequence at least 60%, 65%, 70%, 75%, 80%, 82%, 85%, 87%, 88%, 90%, 92%, 95%, 96%, 97%, 98%, or 99% identical to an RNA sequence encoded by a DNA sequence provided in Table 4, e.g., any one of SEQ ID NOs: 452-561 disclosed in Table 4. In an embodiment, the TREM comprising an ASGPR binding moiety comprises an RNA sequence encoded by a DNA sequence at least 60%, 65%, 70%, 75%, 80%, 82%, 85%, 87%, 88%, 90%, 92%, 95%, 96%, 97%, 98%, or 99% identical to a DNA sequence provided in Table 4, e.g., any one of SEQ ID NOs: 452-561 disclosed in Table 4.

[0299] In an embodiment, the TREM comprising an ASGPR binding moiety comprises at least 5 ribonucleotides (nt), 10 nt, 15 nt, 20 nt, 25 nt, 30 nt, 35 nt, 40 nt, 45 nt, 50 nt, 55 nt or 60 nt (but less than the full length) of an RNA sequence encoded by a DNA sequence provided in Table 4, e.g., any one of SEQ ID NOs: 452-561 disclosed in Table 4. In an embodiment, the TREM comprising an ASGPR binding moiety comprises at least 5 ribonucleotides (nt), 10 nt, 15 nt, 20 nt, 25 nt, 30 nt, 35 nt, 40 nt, 45 nt, 50 nt, 55 nt or 60 nt (but less than the full length) of an RNA sequence which is at least 80%, 85%, 90%, 95%, 96%, 97%, 98%, 99% or 100% identical to an RNA sequence encoded by a DNA sequence provided in Table 4, e.g., any one of SEQ ID NOS: 452-561 disclosed in Table 4. In an embodiment, the TREM comprising an ASGPR binding moiety comprises at least 5 ribonucleotides (nt), 10 nt, 15 nt, 20 nt, 25 nt, 30 nt, 35 nt, 40 nt, 45 nt, 50 nt, 55 nt or 60 nt (but less than the full length) of an RNA sequence encoded by a DNA sequence with at least 80%, 82%, 85%, 87%, 88%, 90%, 92%, 95%, 96%, 97%, 98%, 99% or 100% identity to a DNA sequence provided in Table 4, e.g., any one of SEQ ID NOs: 452-561 disclosed in Table 4.

[0300] In an embodiment, the TREM comprising an ASGPR binding moiety comprises a sequence provided in Table 12, e.g., any one of SEQ ID NOs: 622-1116. In an embodiment, the TREM comprising an ASGPR binding moiety comprises SEQ ID NO. 622. In an embodiment, the TREM comprising an ASGPR binding moiety comprises SEQ ID NO. 623. In an embodiment, the TREM comprising an ASGPR binding moiety comprises SEQ ID NO. 624. In an embodiment, the TREM comprising an ASGPR binding moiety comprises SEQ ID NO. 625. In an embodiment, the TREM comprising an ASGPR binding moiety comprises SEQ ID NO. 626. In an embodiment, the TREM comprising an ASGPR binding moiety comprises SEQ ID NO. 627. In an embodiment, the TREM comprising an ASGPR binding moiety comprises SEQ ID NO. 628. In an embodiment, the TREM comprising an ASGPR binding moiety comprises SEQ ID NO. 629. In an embodiment, the TREM comprising an ASGPR binding moiety comprises SEQ ID NO. 630. In an embodiment, the TREM comprising an ASGPR binding moiety comprises SEQ ID NO. 631. In an embodiment, the TREM comprising an ASGPR binding moiety comprises SEQ ID NO. 632. In an embodiment, the TREM comprising an ASGPR binding moiety comprises SEQ ID NO. 633. In an embodiment, the TREM comprising an ASGPR binding moiety comprises SEQ ID NO. 634. In an embodiment, the TREM comprising an ASGPR binding moiety comprises SEQ ID NO. 635. In an embodiment, the TREM comprising an ASGPR binding moiety comprises SEQ ID NO. 636. In an embodiment, the TREM comprising an ASGPR binding moiety comprises SEQ ID NO. 637. In an embodiment, the TREM comprising an ASGPR binding moiety comprises SEQ ID NO. 638. In an embodiment, the TREM comprising an ASGPR binding moiety comprises SEQ ID NO. 639. In an embodiment, the TREM comprising an ASGPR binding moiety comprises SEQ ID NO. 640. In an embodiment, the TREM comprising an ASGPR binding moiety comprises SEQ ID NO. 641. In an embodiment, the TREM comprising an ASGPR binding moiety comprises SEQ ID NO. 642. In an embodiment, the TREM comprising an ASGPR binding moiety comprises SEQ ID NO. 643. In an embodiment, the TREM comprising an ASGPR binding moiety comprises SEQ ID NO. 644. In an embodiment, the TREM comprising an ASGPR binding moiety comprises SEQ ID NO. 645. In an embodiment, the TREM comprising an ASGPR binding moiety comprises SEQ ID NO. 646. In an embodiment, the TREM comprising an ASGPR binding moiety comprises SEQ ID NO. 647. In an embodiment, the TREM comprising an ASGPR binding moiety comprises SEQ ID NO. 648. In an embodiment, the TREM comprising an ASGPR binding moiety comprises SEQ ID NO. 649. In an embodiment, the TREM comprising an ASGPR binding moiety comprises SEQ ID NO. 650. In an embodiment, the TREM comprising an ASGPR binding moiety comprises SEQ ID NO. 651. In an embodiment, the TREM comprising an ASGPR binding moiety comprises SEQ ID NO. 652. In an embodiment, the TREM comprising an ASGPR binding moiety comprises SEQ ID NO. 653. In an embodiment, the TREM comprising an ASGPR binding moiety comprises SEQ ID NO. 654. In an embodiment, the TREM comprising an ASGPR binding moiety comprises a TREM selected from any one of SEQ ID NO. 622-1116. In an embodiment, the TREM comprising an ASGPR binding moiety comprises a TREM selected from any one of SEQ ID NO. 655-786. In an embodiment, the TREM comprising an ASGPR binding moiety comprises a TREM selected from any one of SEQ ID NO. 787-896. In an embodiment, the TREM comprising an ASGPR binding moiety comprises a TREM selected from any one of SEQ ID NO. 897-1006. In an embodiment, the TREM comprising an ASGPR binding moiety comprises a TREM selected from any one of SEQ ID NO. 1007-1116.

[0301] In an embodiment, the TREM comprising an ASGPR binding moiety comprises a sequence that is at least 60%, 65%, 70%, 75%, 80%, 82%, 85%, 87%, 88%, 90%, 92%, 95%, 96%, 97%, 98%, or 99% identical to a sequence of a TREM provided in Table 12, e.g., any one of SEQ ID NOs. 622-1116 provided in Table 12. In an embodiment, the TREM comprising an ASGPR binding moiety comprises at least 5 ribonucleotides (nt), 10 nt, 15 nt, 20 nt, 25 nt, 30 nt, 35 nt, 40 nt, 45 nt, 50 nt, 55 nt or 60 nt (but less than the full length) of a TREM provided in Table 12, e.g., any one of SEQ ID NOs. 622-1116 disclosed in Table 12. In an embodiment, the TREM comprising an ASGPR binding moiety comprises at least 5 ribonucleotides (nt), 10 nt, 15 nt, 20 nt, 25 nt, 30 nt, 35 nt, 40 nt, 45 nt, 50 nt, 55 nt or 60 nt (but less than the full length) of a TREM which is at least 80%, 85%, 90%, 95%, 96%, 97%, 98%, 99% or 100% identical to TREM provided in Table 12, e.g., any one of SEQ ID NOs. 622-1116 disclosed in Table 12.

[0302] In an embodiment, the TREM comprising an ASGPR binding moiety comprises a sequence that differs no more than 1 ribonucleotide (nt), 2 nt, 3 nt, 4 nt, 5 nt, 6 nt, 7 nt, 8 nt, 9 nt, 10 nt, 12 nt, 14 nt, 16 nt, 18, nt, or 20 nt from a TREM provided in Table 12, e.g., any one of SEQ ID NOs. 622-1116 provided in Table 12.

[0303] In an embodiment, the TREM comprising an ASGPR binding moiety is at least 60%, 65%, 70%, 75%, 80%, 82%, 85%, 87%, 88%, 90%, 92%, 95%, 96%, 97%, 98%, or 99% identical to SEQ ID NO. 622. In an embodiment, the TREM comprising an ASGPR binding moiety is at least 60%, 65%, 70%, 75%, 80%, 82%, 85%, 87%, 88%, 90%, 92%, 95%, 96%, 97%, 98%, or 99% identical to SEQ ID NO. 650. In an embodiment, the TREM comprising an ASGPR binding moiety is at least 60%, 65%, 70%, 75%, 80%, 82%, 85%, 87%, 88%, 90%, 92%, 95%, 96%, 97%, 98%, or 99% identical to SEQ ID NO. 653.

[0304] In an embodiment, the TREM comprising an ASGPR binding moiety comprises a sequence that differs comprises by least 1 ribonucleotide (nt), 2 nt, 3 nt, 4 nt, 5 nt, 6 nt, 7 nt, 8 nt, 9 nt, 10 nt, 12 nt, 14 nt, 16 nt, 18 nt, 20 nt, 25 nt, 30 nt, 40 nt, 45 nt, 50 nt, 55 nt, or more from SEQ ID NO. 622. In an embodiment, the TREM comprising an ASGPR binding moiety comprises a sequence that differs no more than 1 ribonucleotide (nt), 2 nt, 3 nt, 4 nt, 5 nt, 6 nt, 7 nt, 8 nt, 9 nt, 10 nt, 12 nt, 14 nt, 16 nt, 18, nt, or 20 nt from SEQ ID NO. 622. In an embodiment, the TREM comprising an ASGPR binding moiety comprises a sequence that differs comprises by least 1 ribonucleotide (nt), 2 nt, 3 nt, 4 nt, 5 nt, 6 nt, 7 nt, 8 nt, 9 nt, 10 nt, 12 nt, 14 nt, 16 nt, 18 nt, 20 nt, 25 nt, 30 nt, 40 nt, 45 nt, 50 nt, 55 nt, or more from SEQ ID NO. 650. In an embodiment, the TREM comprising an ASGPR binding moiety comprises a sequence that differs no more than 1 ribonucleotide (nt), 2 nt, 3 nt, 4 nt, 5 nt, 6 nt, 7 nt, 8 nt, 9 nt, 10 nt, 12 nt, 14 nt, 16 nt, 18, nt, or 20 nt from SEQ ID NO. 650. In an embodiment, the TREM comprising an ASGPR binding moiety comprises a sequence that differs comprises by least 1 ribonucleotide (nt), 2 nt, 3 nt, 4 nt, 5 nt, 6 nt, 7 nt, 8 nt, 9 nt, 10 nt, 12 nt, 14 nt, 16 nt, 18 nt, 20 nt, 25 nt, 30 nt, 40 nt, 45 nt, 50 nt, 55 nt, or more from SEQ ID NO. 653. In an embodiment, the TREM comprising an ASGPR binding moiety comprises a sequence that differs no more than 1 ribonucleotide (nt), 2 nt, 3 nt, 4 nt, 5 nt, 6 nt, 7 nt, 8 nt, 9 nt, 10 nt, 12 nt, 14 nt, 16 nt, 18, nt, or 20 nt from SEQ ID NO. 653.

### Non-Naturally Occurring Modifications

[0305] A TREM, a TREM core fragment or a TREM fragment described herein may comprise a non-naturally occurring modification, e.g., a modification described in Table 5. A non-naturally occurring modification can be made according to methods known in the art. In an embodiment, a non-naturally occurring modification is a modification that a cell, e.g., a human cell, does not make on an endogenous tRNA. In an embodiment, a non-naturally occurring modification is a modification that a cell, e.g., a human cell, can make on an endogenous tRNA, but wherein such modification is in a location in which it does not occur on a native tRNA. In an embodiment, the non-naturally occurring modification is in a domain, linker or arm which does not have such modification in nature. In an embodiment, the non-naturally occurring modification is at a position within a domain, linker or arm, which does not have such modification in nature. In an embodiment, the non-naturally occurring modification is on a nucleotide which does not have such modification in nature. In an embodiment, the non-naturally occurring modification is on a nucleotide at a position within a domain, linker or arm, which does not have such modification in nature.

[0306] In an embodiment, a TREM, a TREM core fragment or a TREM fragment described herein comprises a modification provided in Table 5, or a combination thereof. The modifications provided in Table 5 are non-naturally occurring or occur naturally in RNAs, and are used herein on a synthetic TREM, a TREM core fragment or a TREM fragment at a position that does not occur in nature.

TABLE 5
Exemplary modifications

Chemical Modification

| | |
|---|---|
| (S)-constrained ethyl (cEt) | 5-(methoxycarbonyl-methyl)uracil |
| (+)1-(2-Hydroxypropyl)pseudouridine | 5-(methyl)2(thio)uracil |
| (2R)-1-(2-Hydroxypropyl)pseudouridine | 5-(methyl)2,4(dithio)uracil |
| (2S)-1-(2-Hydroxypropyl)pseudouridine | 5-(methyl)4(thio)uracil |
| (3-(3-amino-3-carboxypropyl)uridine | 5-(methyl)-2-(thio)pseudouracil |
| (E)-5-(2-Bromo-vinyl)ara-uridine | 5-(methyl)-2-(thio)uracil |
| (E)-5-(2-Bromo-vinyl)cytidine | 5-(methyl)-2,4(dithio)pseudouracil |
| (E)-5-(2-Bromo-vinyl)uridine | 5-(methyl)-2,4-(dithio)uracil |
| (E)-vinylphosphonate | 5-(methyl)-4(thio)pseudouracil |
| (R)5′-C-methyl | 5-(methyl)isocarbostyrilyl |
| (R)5′-C-methyl with phosphate | 5-(methyl)pseudouracil |
| (S)5′-C-methyl | 5-(methylaminomethyl)-2(thio)uracil |
| (S)5′-C-methyl with phosphate | 5-(methylaminomethyl)-2,4(dithio)uracil |
| (Z)-5-(2-Bromo-vinyl)ara-uridine | 5-(methylaminomethyl)-4-(thio)uracil |
| (Z)-5-(2-Bromo-vinyl)uridine | 5-(propynyl)uracil |
| 1(4-Nitro-phenyl)pseudouridine | 5-(propynyl)cytosine |
| 1-(aminocarbonylethylenyl)-2(thio)- | 5-(trifluoromethyl)cytosine |
| pseudouracil | |
| 1-(aminocarbonylethylenyl)-2,4- | 5-(trifluoromethyl)uracil |
| (dithio)pseudouracil | |
| 1-(2,2,2-Trifluoroethyl)-pseudouridine | 5,2′-O-dimethylcytidine |
| 1-(2,2,3,3,3-Pentafluoropropyl)pseudouridine | 5,2′-O-dimethyluridine |
| 1-(2,2-Diethoxyethyl)pseudouridine | 5,6-dihydro-uridine |
| 1-(2,4,6-Trimethylbenzyl)pseudouridine | 5-Aminoallyl-cytosine |
| 1-(2,4,6-Trimethyl-benzyl)pseudo-uridine | 5-aminoallyl-uridine |
| 1-(2,4,6-Trimethyl-phenyl)pseudo-uridine | 5-aminomethyl-2-thiouridine |
| 1-(2-Amino-2-carboxyethyl)pseudo-uridine | 5-aza-2-thio-zebularine |
| 1-(2-Amino-ethyl)pseudouridine | 5-aza-cytidine |
| 1-(2-Hydroxyethyl)pseudouridine | 5-aza-uridine |
| 1-(2-Methoxyethyl)pseudouridine | 5-aza-zebularine |
| 1-(3,4-Bis- | 5-bromo-cytidine |
| trifluoromethoxvbenzyl)pseudouridine | |
| 1-(3,4-Dimethoxybenzyl)pseudouridine | 5-bromo-uridine |
| 1-(3-Amino-3-carboxypropyl)pseudo-uridine | 5-carbamoylmethyl-2′-O-methyluridine |
| 1-(3-Amino-propyl)pseudouridine | 5-carbamoylmethyluridine |
| 1-(3-Cyclopropyl-prop-2-ynyl)pseudouridine | 5-carboxyhydroxymethyluridine |
| TP | |
| 1-(4-Amino-4-carboxybutyl)pseudouridine | 5-carboxyhydroxymethyluridine methyl ester |
| 1-(4-Amino-benzyl)pseudouridine | 5-carboxymethylaminomethyl-2-thiouridine |
| 1-(4-Amino-butyl)pseudouridine | 5-carboxymethylaminomethyl-2′-O- |
| | methyluridine |
| 1-(4-Amino-phenyl)pseudouridine | 5-carboxymethylaminomethyl-2-thiouridine |
| 1-(4-Azidobenzyl)pseudouridine | 5-carboxymethylaminomethyluridine |
| 1-(4-Bromobenzyl)pseudouridine | 5-carboxymethyluridine |
| 1-(4-Chlorobenzyl)pscudouridinc | 5-Cyanocytidinc |
| 1-(4-Fluorobenzyl)pseudouridine | 5-Cyanouridine |
| 1-(4-Iodobenzyl)pseudouridine | 5-Dimethylaminouridine |
| 1-(4-Methanesulfonylbenzyl)pseudouridine | 5-Ethynylara-cytidine |
| 1-(4-Methoxybenzyl)pseudouridine | 5-Ethynylcytidine |
| 1-(4-Methoxy-phenyl)pseudouridine | 5-formyl-2′-O-methylcytidine |
| 1-(4-Methylbenzyl)pseudouridine | 5-formylcytidine |
| 1-(4-Nitrobenzyl)pseudouridine | 5′-Homo-adenosine |
| 1-(4-Thiomethoxybenzyl)pseudouridine | 5′-Homo-cytidine |
| 1-(4-Trifluoromethoxybenzyl)pseudouridine | 5′-Homo-guanosine |
| 1-(4-Trifluoromethylbenzyl)pseudouridine | 5′-Homo-uridine |
| 1-(5-Amino-pentyl)pseudouridine | 5-hydroxymethylcytidine |
| 1-(6-Amino-hexyl)pseudouridine | 5-hydroxyuridine |
| 1-(aminoalkylamino-carbonylethylenyl)- | 5-iodo-2′-fluoro-deoxyuridine |
| 2(thio)-pseudouracil | |
| 1-(aminoalkylaminocarbonylethylenyl)-2,4- | 5-iodo-cytidine |
| (dithio)pseudouracil | |
| 1-(aminoalkylaminocarbonylethylenyl)- | 5-iodo-uridine |
| pseudouracil | |
| 1-(aminoalkylaminocarbonylethylenyl)-4- | 5-methoxycarbonylmethyl-2-thiouridine |
| (thio)pseudouracil | |
| 1-(aminocarbonylethylenyl)-4- | 5-methoxycarbonylmethyl-2′-O- |
| (thio)pseudouracil | methyluridine |
| 1-(aminocarbonylethylenyl)-pseudouracil | 5-methoxycarbonylmethyluridine |
| 1-(aza)-2-(thio)-3-(aza)-phenoxazin-1-yl | 5-Methoxycytidine |
| 1,2′-O-dimethyladenosine | 5-methoxyuridine |
| 1,2′-O-dimethylguanosine | 5-methyl-2-thiouridine |
| 1,2′-O-dimethylinosine | 5-methylaminomethyl-2-selenouridine |
| 1,3-(diaza)-2-(oxo)-phenthiazin-1-yl | 5-methylaminomethyl-2-thiouridine |
| 1,3-(diaza)-2-(oxo)-phenoxazin-1-yl | 5-methylaminomethyluridine |
| 1,3,5-(triaza)-2,6-(dioxa)-naphthalene | 5-methylcytidine |
| 1,6-Dimethyl-pseudouridine | 5-Methyldihydrouridine |
| 1-{3-[2-(2-Aminoethoxy)-ethoxy]- | 5-methyluridine |
| propionvl}pseudouridine | |
| 1-Acetylpseudouridine | 5-methyl-zebularine |
| 1-Allylpseudouridine | 5-nitroindole |
| 1-Aminomethyl-pseudo-uridine | 5-Oxyacetic acid-Uridine |
| 1-Benzoylpseudouridine | 5-Oxyacetic acid-methyl ester-Uridin Nl- |
| | methyl-pseudouridine |
| 1-Benzyloxymethylpseudouridine | 5-Phenylethynyluridine |
| 1-Benzyl-pseudo-uridine | 5′-phosphorothioate |
| 1-Biotinylpseudouridine | 5-propynyl cytosine |
| 1-Butyl-pseudo-uridine | 5-propynyl uracil |
| 1-carboxymethyl-pseudouridine | 5-taurinomethyl-2-thiouridine |
| 1-Cyanomethylpseudouridine | 5-taurinomethyluridine |
| 1-Cyclobutylmethyl-pseudo-uridine | 5-Trideuteromethyl-6-deuterouridine |
| 1-Cyclobutyl-pseudo-uridine | 5-Trifluoromethyl-Cytidine |
| 1-Cycloheptylmethyl-pseudo-uridine | 5-Trifluoromethyl-Uridine |
| 1-Cycloheptyl-pseudo-uridine | 5-uracil |
| 1-Cyclohexylmethyl-pseudo-uridine | 5-Vinylarauridine |
| 1-Cyclohexyl-pseudo-uridine | 6(azo)uracil |
| 1-Cyclooctylmethyl-pseudo-uridine | 6-(2,2,2-Trifluoroethyl)-pseudo-uridine |
| 1-Cyclooctyl-pseudo-uridine | 6-(4-Morpholino)-pseudo-uridine |
| 1-Cyclopentylmethyl-pseudo-uridine | 6-(4-Thiomorpholino)-pseudo-uridine |
| 1-Cyclopentyl-pseudo-uridine | 6-(alkyl)guanine |
| 1-Cyclopropylmethyl-pseudo-uridine | 6-(alkyl)adenine |
| 1-Cyclopropyl-pseudo-uridine | 6-(aza)pyrimidine |
| 1-deazaadenosine | 6-(azo)cytosine |
| 1-Ethyl-pseudo-uridine | 6-(azo)thymine |
| 1-Hexyl-pseudo-uridine | 6-(azo)uracil |
| 1-Homoallylpseudouridine | 6-(methyl)-7-(aza)indolyl |
| 1-Hydroxymethylpseudouridine | 6-(methyl)adenine |
| 1-iso-propyl-pseudo-uridine | 6-(methyl)guanine |
| 1-Me-2-thio-pseudo-uridine | 6-(Substituted-Phenyl)-pseudo-uridine |
| 1-Me-4-thio-pseudo-uridine | 6-Amino-pseudo-uridine |
| 1-Me-alpha-thio-pseudo-uridine | 6-aza-cytidine |
| 1-Me-guanosine | 6-aza-uridine |
| 1-Methanesulfonylmethylpseudouridine | 6-Azido-pseudo-uridine |
| 1-Methoxymethylpseudouridine | 6-Bromo-pseudo-uridine |
| 1-Methyl-6-amino-pseudo-uridine | 6-Butyl-pseudo-uridine |
| 1-Methyl-6-bromo-pseudo-uridine | 6-Chloro-pseudo-uridine |
| 1-Methyl-6-cyano-pseudo-uridine | 6-chloro-purine |
| 1-Methyl-6-hydroxyamino-pseudo-uridine | 6-Cyano-pseudo-uridine |
| 1-Methyl-6-trifluoromethoxy-pseudo-uridine | 6-Dimethylamino-pseudo-uridine |
| 1-methyladenosine | 6-Ethoxy-pseudo-uridine |
| 1-methylguanosine | 6-Ethylcarboxylate-pseudo-uridine |
| 1-methylinosine | 6-Ethyl-pseudo-uridine |
| 1-methylpseduouridine | 6-Fluoro-pseudo-uridine |
| 1-methyl-pseudoisocytidine | 6-Formyl-pseudo-uridine |
| 1-methyl-pseudouridine | 6-Hydroxyamino-pseudo-uridine |
| 1-Methyl-pseudo-UTP | 6-Hydroxy-pseudo-uridine |
| 1-Morpholinomethylpseudouridine | 6-Iodo-pseudo-uridine |
| 1-Pentyl-pseudo-uridine | 6-iso-Propyl-pseudo-uridine |
| 1-Phenyl-pseudo-uridine | 6-methoxy-guanosine |
| 1-Pivaloylpseudouridine | 6-Methoxy-pseudo-uridine |
| 1-Propargylpseudouridine | 6-Methylamino-pseudo-uridine |
| 1-Propyl-pseudo-uridine | 6-methyl-guanosine |
| 1-propynyl-pseudouridine | 6-Methyl-pseudo-uridine |
| 1-propynyl-uridine | 6-Phenyl-pseudo-uridine |
| 1-p-tolyl-pseudo-uridine | 6-phenyl-pyrrolo-pyrimidin-2-on-3-yl |
| 1-substituted 2-(thio)-pseudouracil | 6-Propyl-pseudo-uridine |
| 1-substituted 2,4-(dithio)pseudouracil | 6-tert-Butyl-pseudo-uridine |
| 1-substituted 4-(thio)pseudouracil | 6-thio-7-deaza-8-aza-guanosine |
| 1-substituted pseudouracil | 6-thio-7-deaza-guanosine |
| 1-taurinomethyl-pseudouridine | 6-thio-7-methyl-guanosine |
| 1-tert-Butyl-pseudo-uridine | 6-thio-guanosine |
| 1-Thiomethoxymethylpseudouridine | 6-Trifluoromethoxy-pseudo-uridine |
| 1-Thiomorpholinomethylpseudouridine | 6-Trifluoromethyl-pseudo-uridine |
| 1-Trifluoroacetylpseudouridine | 7-(alkyl)guanine |
| 1-Trifluoromethylpseudouridine | 7-(aminoalkylhydroxy)-1-(aza)-2-(thio)-3- |
| | (aza)-phenthiazin-1-yl |
| 1-Vinylpseudouridine | 7-(aminoalkylhydroxy)-1-(aza)-2-(thio)-3- |
| | (aza)-phenoxazin-1-yl |
| 2-(amino)purine | 7-(aminoalkylhydroxy)-1,3-(diaza)-2-(oxo)- |
| | phenthiazin-1-yl |
| 2-(thio)pseudouracil | 7-(aminoalkylhydroxy)-1,3-(diaza)-2-(oxo)- |
| | phenoxazin-1-yl |
| 2′-alpha-Ethynylcytidinc | 7-(aza)indolyl |
| 2′-alpha-Ethynylguanosine | 7-(deaza)adenine |
| 2′-alpha-Ethynyluridine | 7-(deaza)guanine |
| 2′-alpha-Trifluoromethyladenosine | 7-(guanidiniumalkylhydroxy)-1-(aza)-2- |
| | (thio)-3-(aza)-phenoxazinl-yl |
| 2′-alpha-Trifluoromethylguanosine | 7-(guanidiniumalkylhydroxy)-1-(aza)-2- |
| | (thio)-3-(aza)-phenthiazin-1-yl |
| 2′-alpha-Trifluoromethyluridine | 7-(guanidiniumalkylhydroxy)-1-(aza)-2- |
| | (thio)-3-(aza)-phenoxazin-1-yl |
| 2′-Amino-2′-deoxycytosine | 7-(guanidiniumalkyl-hydroxy)-1,3-(diaza)-2- |
| | (oxo)-phenthiazin-1-yl |
| 2′-amino-2′-deoxyribose | 7-(guanidiniumalkylhydroxy)-1,3-(diaza)-2- |
| | (oxo)-phenoxazin-1-yl |
| 2′-alpha-Trifluoromethylcytidine | 7-(methyl)guanine |
| 2′-Azido-2′-deoxycytosine | 7-(propynyl)isocarbostyrilyl |
| 2′-azido-2′-deoxyribose | 7-(propynyl)isocarbostyrilyl |
| 2′-Azido-deoxyuridine | 7-propynyl(aza)indolyl |
| 2′-beta-Ethynyladenosine | 7-aminomethyl-7-deazaguanosine |
| 2′-beta-Ethynylguanosine | 7-cyano-7-deazaguanosine |
| 2′-beta-Ethynyluridine | 7-deaza-2-aminopurine |
| 2′-beta-Trifluoromethyluridine | 7-deaza-2,6-diaminopurine |
| 2′-beta-Ethynylcytidine | 7-deaza-2-amino-purine |
| 2′-bromo-deoxyuridine | 7-deaza-8-aza-2,6-diaminopurine |
| 2′-deoxyuridine | 7-deaza-8-aza-2-aminopurine |
| 2′-Deoxy-2′,2′-difluoroadenosine | 7-deaza-8-aza-adenine |
| 2′-Deoxy-2′,2′-difluorocytidine | 7-deaza-8-aza-adenosine |
| 2′-Deoxy-2′,2′-difluoroguanosine | 7-deaza-8-aza-guanosine |
| 2′-Deoxy-2′,2′-difluorouridine | 7-deaza-adenosine |
| 2′-Deoxy-2′-alpha-aminocytidine | 7-deaza-guanosine |
| 2′-Deoxy-2′-alpha-aminouridine TP | 7-deaza-inosinyl |
| 2′-Deoxy-2′-alpha-azidocytidine | 7-methyl-8-oxo-guanosine |
| 2′-Deoxy-2′-alpha-azidouridine TP | 7-methyladenine |
| 2′-Deoxy-2′-alpha-mercaptoadenosine | 7-methylguanosine |
| 2′-Deoxy-2′-alpha-mercaptocytidine | 7-methylinosine |
| 2′-Deoxy-2′-alpha-mercaptoguanosine | 7-substituted 1-(aza)-2-(thio)-3-(aza)- |
| | phenoxazin-1-yl |
| 2′-Deoxy-2′-alpha-thiomethoxyadenosine | 7-substituted 1,3-(diaza)-2-(oxo)-phenoxazin- |
| | 1-yl |
| 2′-Deoxy-2′-alpha-thiomethoxycytidine | 8-(alkenyl)adenine |
| 2′-Deoxy-2′-alpha-thiomethoxyguanosine | 8-(alkenyl)guanine |
| 2′-Deoxy-2′-alpha-thiomethoxyuridine | 8-(alkyl)adenine |
| 2′-Deoxy-2′-alpha-mercaptouridine | 8-(alkyl)guanine |
| 2′-Deoxy-2′-beta-aminoadenosine | 8-(alkynyl)adenine |
| 2′-Deoxy-2′-beta-aminoguanosine | 8-(alkynyl)guanine |
| 2′-Deoxy-2′-beta-aminouridine | 8-(amino)adenine |
| 2′-Deoxy-2′-beta-azidoadenosine | 8-(amino)guanine |
| 2′-Deoxy-2′-beta-azidocytidine | 8-(halo)adenine |
| 2′-Deoxy-2′-beta-azidoguanosine | 8-(halo)guanine |
| 2′-Deoxy-2′-beta-azidouridine | 8-(hydroxyl)adenine |
| 2′-Deoxy-2′-beta-aminocytidine | 8-(hydroxyl)guanine |
| 2′-Deoxy-2′-beta-bromoadenosine | 8-(thioalkyl)adenine |
| 2′-Deoxy-2′-beta-bromocytidine | 8-(thioalkyl)guanine |
| 2′-Deoxy-2′-beta-bromoguanosine | 8-(thiol)adenine |
| 2′-Deoxy-2′-beta-bromouridine | 8-(thiol)guanine |
| 2′-Deoxy-2′-beta-chloroadenosine | 8-Aza-adenosine |
| 2′-Deoxy-2′-beta-chlorocytidine | 8-azido-adenosine |
| 2′-Deoxy-2′-beta-chloroguanosine | 8-bromo-adenosine |
| 2′-Deoxy-2′-beta-chlorouridine | 8-bromo-guanosine |
| 2′-Deoxy-2′-beta-fluoroadenosine | 8-oxo-guanosine |
| 2′-Deoxy-2′-beta-fluorocytidine | 8-Trifluoromethyladenosine |
| 2′-Deoxy-2′-beta-fluoroguanosine | 9-(methyl)-imidizopyridinyl |
| 2′-Deoxy-2′-beta-fluorouridine | 9-Deazaadenosine |
| 2′-Deoxy-2′-beta-iodoadenosine | 9-Deazaguanosine |
| 2′-Deoxy-2′-beta-iodocytidine | alkene containing backbones |
| 2′-Deoxy-2′-beta-iodoguanosine | alkyl phosphonates |
| 2′-Deoxy-2′-beta-iodouridine | allyamino-thymidine |
| 2′-Deoxy-2′-beta-mercaptoadenosine | allyamino-uracil |
| 2′-Deoxy-2′-beta-mercaptocytidine | alpha-thio-cytidine |
| 2′-Deoxy-2′-beta-mercaptoguanosine | alpha-thio-guanosine |
| 2′-Deoxy-2′-beta-mercaptouridine | alpha-thio-pseudo-uridine |
| 2′-Deoxy-2′-beta-thiomethoxyadenosine | alpha-thio-uridine |
| 2′-Deoxy-2′-beta-thiomethoxycytidine TP | altriol |
| 2′-Deoxy-2′-beta-thiomethoxyuridine | aminoalkylphosphoramidates |
| 2′-deoxyuridine | aminoalkylphosphotriesters |
| 2′-F-5-Methyl-2′-deoxyuridine | aminoindolyl |
| 2′-Fluoro | anthracenyl |
| 2′-fluoro-modified bases | archaeosine |
| 2′-fluorouridine | aza cytosine |
| 2′-methyl,2′-amino,2′-azido,2′-fluoro- | aza thymidine |
| adenine | |
| 2′-methyl,2′-amino,2′-azido,2′-fluroo- | aza uracil |
| cytidine | |
| 2′-OH-ara-adenosinc | aza adeninc |
| 2′-OH-ara-cytidine | azaguanine |
| 2′-OH-ara-guanosine | bis-ortho-(aminoalkylhydroxy)-6-phenyl- |
| | pyrrolo-nvrimidin-2-on-3-yl |
| 2′-OH-ara-uridine | bis-ortho-substituted-6-phenyl-pyrrolo- |
| | pyrimidin-2-on-3-yl |
| 2′-OMe-2-Aminoadenosine | boranophosphates |
| 2′-OMc-5-Mc-uridinc | —CH2—O—N(CH3)—CH2— |
| 2′-OMe-pseudouridine | —CH2—N(CH3)—N(CH3)—CH2— |
| 2′-O-Methyl-5-(1-propynyl)cytidine | —CH2—NH—CH2— |
| 2′-O-Methyl-5-(1-propynyl)uridine | chiral phosphonates |
| 2′-O-methyladenosine | chiral phosphorothioates |
| 2′-O-methylation | Constrained nucleic acid (CNA) |
| 2′-O-methylcytidine | deaza cytosine |
| 2′-O-mcthylguanosinc | dcaza guaninc |
| 2′-O-methylinosine | deaza thymidine |
| 2′-O-methyl-ribose | deaza uracil |
| 2′-O-methyluridine | deazaadenine |
| 2′-O-ribosyladenosine(phosphate) | deoxy-thymidine |
| 2-(alkyl)guanine | difluorotolyl |
| 2-(alkyl)adenine | dihydropseudouridine |
| 2-(amino)adenine | dihydrouridine |
| 2-(aminoalkyl)adenine | DNA |
| 2-(aminopropyl)adenine | epoxyqueuosine |
| 2-(halo)adenine | Fluoro hexitol nucleic acid (FHNA) |
| 2-(methylthio)N6(isopentenyl)adenine | formacetyl and thioformacetyl backbones |
| 2-(propyl)adenine | Formycin A |
| 2-(propyl)guanine | Formycin B |
| 2-(thio)cytosine | galactosyl-queuosine |
| 2-(thio)uracil | GNA (glycol nucleic acid) |
| 2,2′-anhydro-cytidine | hydroxywybutosine |
| 2,2′-anhydro-uridine | hypoxanthine |
| 2,4-(dithio)pseudouracil | imidizopyridinyl |
| 2,4,5-(trimethyl)phenyl | inosinyl |
| 2,6-(diamino)purine | isocarbostyrily1 |
| 2,6-diaminopurine | isoguanosine |
| 2′-alpha-ethynyladenosine | isopentenyladenosine |
| 2′-Amino-2′-deoxy-guanosine | isowyosme |
| 2′-Amino-2′-deoxy-uridine | 1-Alkyl-6-homoallyl-pseudo-uridine |
| 2-amino-6-Chloro-purine | 1-Methyl-6-(2,2,2-Trifluoroethyl)pseudo- |
| | uridine |
| 2-aminoadenine | 1-Methyl-6-(4-thiomorpholino)-pseudo- |
| | uridine |
| 2-Aminoadenosine | 1-Methyl-6-azido-pseudo-uridine |
| 2-aminopurine | 1-Methyl-6-chloro-pseudo-uridine |
| 2-Amino-riboside | 1-Methyl-6-dimethylamino-pseudo-uridine |
| 2-aza-inosinyl | 1-Methyl-6-ethoxy-pseudo-uridine |
| 2′-azido-2′-deoxyadenosine | 1-Methyl-6-ethylcarboxylate-pseudo-uridine |
| 2′-Azido-2′-deoxy-guanosine | 1-Methyl-6-fluoro-pseudo-uridine |
| 2′-Azido-2′-deoxy-uridine | 1-Methyl-6-hydroxy-pseudo-uridine |
| 2-Azidoadenosine | 1-Methyl-6-iodo-pseudo-uridine |
| 2′-beta-Trifluoromethyladenosine | 1-Methyl-6-methylamino-pseudo-uridine |
| 2′-beta-Trifluoromethylguanosine | 1-[3-(2-{2-[2-(2-Aminoethoxy)-ethoxy]- |
| | ethoxy}-ethoxy)-propionyllpseudouridine |
| 2-Bromoadcnosinc | 1-Alkyl-6-(1-propynyl)-pscudo-uridinc |
| 2′-beta-Trifluoromethylcytidine | 1-Alkyl-6-(2-propynyl)-pseudo-uridine |
| 2-Chloroadenosine | 1-Alkyl-6-allyl-pseudo-uridine |
| 2′-Deoxy-2′-alpha-aminoadenosine | 1-Alkyl-6-ethynyl-pseudo-uridine |
| 2′-Deoxy-2′-alpha-aminoguanosine | 1-Alkyl-6-vinyl-pseudo-uridine |
| 2′-Deoxy-2′-alpha-azidoadenosine | 1-Biotinyl-PEG2-pseudouridine |
| 2′-Deoxy-2′-alpha-azidoguanosine | 1-methyl-1-deaza-pseudoisocytidine |
| 2′-Deoxy-2′-beta-thiomethoxyguanosine | 1-methyl-1-deaza-pseudouridine |
| 2′-Fluor-N4-Bz-cytidine | 1-Methyl-3-(3-amino-3- |
| | carboxyproovl)pseudo-Uridine |
| 2′-fluoro-2′-deoxyribose | 1-Methyl-3-(3-amino-3-carboxypropyl) |
| | pseudouridine |
| 2-Fluoroadenosinc | 1-methyl-3-(3-amino-5- |
| | carboxypropyl)pseudouridine |
| 2′-Fluoro-N2-isobutyl-guanosine | 1-Methyl-6-(4-morpholino)-pseudo-uridine |
| 2′-Fluoro-N4-Acetyl-cytidine | 1-Methyl-6-(substituted phenyl)pseudo- |
| | uridine |
| 2′-Fluoro-N6-Bz-deoxyadenosine | 1-Methyl-6-butyl-pseudo-uridine |
| 2-Iodoadenosine | 1-Methyl-6-ethyl-pseudo-uridine |
| 2-Mercaptoadenosine | 1-Methyl-6-formyl-pseudo-uridine |
| 2-methoxy-4-thio-pseudouridine | 1-Methyl-6-iso-propyl-pseudo-uridine |
| 2-methoxy-4-thio-uridine | 1-Methyl-6-methoxy-pseudo-uridine |
| 2-methoxy-5-methyl-cytidine | 1-Methyl-6-phenyl-pseudo-uridine |
| 2-methoxy-adenine | 1-Methyl-6-propyl-pseudo-uridine |
| 2-methoxy-cytidine | 1-Methyl-6-tert-butyl-pseudo-uridine |
| 2-methoxyuridine | 1-methyl-6-thio-guanosine |
| 2′-methyl,2′-amino,2′-azido,2′-fluro- | 1-Methyl-6-trifluoromethyl-pseudo-uridine |
| guanosine | |
| 2′-methyl,2′-amino,2′-azido,2′fluro-uridine | Locked nucleic acid (LNA) |
| 2-methyladenosine | 1-taurinomethyl-1-methyl-uridine |
| 2-methylpseudouridine | 1-taurinomethyl-4-thio-uridine |
| 2-methylthioadenine | lysidine |
| 2-methylthio-N6 isopentenyladenosine | mannosyl-queuosine |
| 2-methylthio-N6-(cis- | Methyl phosphonate |
| hydroxyisopentenyl)adenosine | |
| 2-methylthio-N6-hydroxynorvalyl | methylene (methylimino) |
| carbamoyladenosine | |
| 2-methylthio-N6-isopentenyladenosine | methylene formacetyl and thioformacetyl |
| | backbones |
| 2-methylthio-N6-methyladenosine | methyleneimino and methylenehydrazino |
| | backbones |
| 2-methylthio-N6-threonyl | methylphosphonates |
| carbamoyladenosine | |
| 2′-O-methoxyethyl(MOE) | methylwyosine |
| 2′-O-methoxyethylribose(MOE) | morpholino linkages |
| 2′-O-methyl | mosme |
| 2′-O-methyladenosine | N(methyl)guanine |
| 2′-O-methylcytidine | —N(CH3)—CH2—CH2— |
| 2′-O-methylguanosine | N-(methyl)guanine |
| 2′-O-methylinosine | N2,7,2′-O-trimethylguanosine |
| 2′O-methyl-N2-isobutyl-guanosine | N2,2′-O-dimethylguanosine |
| 2′-O-Methyl-N4-Acetyl-cytidine | N2,7-dimethylguanosine |
| 2′-O-methyl-N4-Bz-cytidine | N2,N2,2′-O-trimethylguanosine |
| 2′-O-methyl-N6-Bz-deoxyadenosine | N2,N2,7-trimethylguanosine |
| 2′-O-methylpseudouridine | N2,N2-dimethyl-6-thio-guanosine |
| 2′-O-methyluridine | N2,N2-dimethylguanosine |
| 2′-O-ribosyladenosine(phosphate) | N2-isobutyl-guanosine |
| 2′-O-ribosylguanosine(phosphate) | N2-methyl-6-thio-guanosine |
| 2-oxo-7-aminopyridopyrimidin-3-yl | N2-methylguanosine |
| 2-oxo-pyridopyrimidine-3-yl | N2-substituted purines |
| 2-pyridinone | N3(methyl)uracil |
| 2-thio-1-methyl-1-deaza-pseudouridine | N4(acetyl)cytosine |
| 2-thio-1-methyl-pseudouridine | N4,2′-O-dimethylcytidine |
| 2-thio-2′-O-methyluridine | N4,N4-Dimethyl-2′-OMe-Cytidine |
| 2-thio-5-aza-uridine | N4-acetyl-2′-O-methylcytidine |
| 2-thio-5-methyl-cytidine | N4-acetylcytidine |
| 2-thiocytidine | N4-Amino-cytidine |
| 2-thio-dihydropseudouridine | N4-Benzoyl-cytidine |
| 2-thio-dihydrouridine | N4-methylcytidine |
| 2-thio-pseudouridine | N6-(19-Amino-pentaoxanonadecyl)adenosine |
| 2-thiouridine | N6-(cis-hydroxyisopentenyl)adenosine |
| 2-thio-zebularine | N6-(isopentyl)adenine |
| 2-Trifluoromethyladenosine | N6-(methyl)adenine |
| 3-(deaza)-5-(aza)cytosine | N6,N6(dimethyl)adenine |
| 3-(methyl)cytosine | N6,2′-O-dimethyladenosine |
| 3-nitropyrrole | N6,N6,2′-O-trimethyladenosine |
| 3-(3-amino-3-carboxypropyl)uracil | N6,N6-dimethyladenosine |
| 3-(3-amino-3-carboxypropyl)uridine | N6-acetyladenosine |
| 3-(alkyl)cytosine | N6-cis-hydroxy-isopentenyl-adenosine |
| 3-(methyl)-7-(propynyl)isocarbostyrilyl | N6-glycinylcarbamoyladenosine |
| 3-(methyl)cytidine | N6-hydroxynorvalylcarbamoyladenosine |
| 3-(methyl)isocarbostyrilyl | N6-isopentenyladenosine |
| 3,2′-0-dimethyluridine | N6-methyl-2-amino-purine |
| 3′-alkylene phosphonates | N6-methyladenosine |
| 3-alkyl-pseudouridine | N6-methyl-N6-threonylcarbamoyladenosine |
| 3′-aminophosphoramidate | N6-substituted purines |
| 3-deaza-3-bromoadenosine | N6-threonylcarbamoyladenosine |
| 3-deaza-3-chloroadenosine | N-alkylated derivative |
| 3-deaza-3-fluoroadenosine | napthalenyl |
| 3-deaza-3-iodoadenosine | nitrobenzimidazolyl |
| 3-deazaadenosine | nitroimidazolyl |
| 3′-ethynylcytidine | nitroindazolyl |
| 3-methylcytidine | nitropyrazolyl |
| 3-methyl-pseudouridine | N1-methyl-adenosine |
| 3-methyluridine | N1-methyl-guanosine |
| 4′-azidoadenosine | nubularine |
| 4′-azidouridine | 06-substituted purines |
| 4′-ethynyladenosine | O-alkylated derivative |
| 4′-ethynylcytidine | oligonucleosides with heteroatom |
| | internucleoside linkage |
| 4′-ethynylguanosine | ortho-(aminoalkylhydroxy)-6-phenyl-pyrrolo- |
| | pyrimidin-2-on-3-yl |
| 4′-ethynyluridine | ortho-substituted-6-phenyl-pyrrolo-pyrimidin- |
| | 2-on-3-yl |
| 4-(fluoro)-6-(methyl)benzimidazole | Oxoformycin TP |
| 4-(methyl)benzimidazole | para-(aminoalkylhydroxy)-6-phenyl-pyrrolo- |
| | pyrimidin-2-on-3-yl |
| 4-(methyl)indolyl | para-substituted-6-phenyl-pyrrolo-pyrimidin- |
| | 2-on-3-yl |
| 4-(thio)pseudouracil | pentacenyl |
| 4-(thio)uracil | peroxywybutosine |
| 4,2′-O-dimethylcytidine | phenanthracenyl |
| 4,6-(dimethyl)indolyl | phenyl |
| 4′-azidocytidine | phosphinates |
| 4′-azidoguanosine | phosphonoacetates |
| 4′-carbocyclic adenosine | phosphoramidates |
| 4′-carbocyclic cytidine | Phosphorodiamidate Morpholino Oligomer |
| | (PMO) |
| 4′-carbocyclic guanosine | phosphorodithioates |
| 4′-carbocyclic uridine | Phosphorothioate |
| 4-demethylwyosine | phosphorothioate internucleoside linkages |
| 4-methoxy-1-methyl-pscudoisocytidinc | phosphorothioates |
| 4-methoxy-2-thio-pseudouridine | phosphotriesters |
| 4-methoxy-pseudoisocytidine | PNA |
| 4-methoxy-pseudouridine | propynyl-7-(aza)indolyl |
| 4-methylcytidine | pseudoisocytidine |
| 4-thio-1-methyl-1-deaza-pseudoisocytidine | Pseudo-iso-cytidine |
| 4-thio-1-methyl-pseudoisocytidine | pseudouracil |
| 4-thio-1-methyl-pseudouridine | pseudouridine |
| 4-thio-pseudoisocytidine | Pseudouridine 1-(4-methylbenzenesulfonic |
| | acid) |
| 4-thio-pseudouridine | Pseudouridine 1-(4-methylbenzoic acid) TP |
| 4-thiouracil | Pseudouridine 1-methylphosphonic acid |
| 4-thiouridine | Pseudouridine 1-[3-(2-ethoxy)]propionic acid |
| 5(halo)cytosine | Pseudouridine 1-[3-{2-(2-[2-(2-ethoxy)- |
| | ethoxy]-ethoxy)-ethoxy}]propionic acid |
| 5(methyl)4(thio)uracil | Pseudouridine 1-[3-{2-(2-[2-{2(2-ethoxy)- |
| | ethoxy}-ethoxy]-ethoxy)-ethoxy}]propionic |
| | acid |
| 5(methyl)cytosine | Pseudouridine 1-[3-{2-(2-[2-ethoxy]-ethoxy)- |
| | ethoxy}]propionic acid |
| 5(methylaminomethyl)-2(thio)uracil | Pseudouridine 1-[3-{2-(2-ethoxy)-ethoxv}] |
| | propionic acid |
| 5(methylaminomethyl)-2,4(dithio)uracil | Pscudouridinc TP 1-methylphosphonic acid |
| | diethyl ester |
| 5(methylaminomethyl)-4(thio)uracil | Pseudo-uridine-1-2-ethanoic acid |
| 5(propynyl)cytosine | Pseudo-uridine-N1-5-pentanoic acid |
| 5(propynyl)uracil | Pseudo-uridine-N1-3-propionic acid |
| 5(trifluoromethyl)cytosine | Pseudo-uridine-N1-4-butanoic acid |
| 5(trifluoromethyl)uracil | Pseudo-uridine-N1-6-hexanoic acid |
| 5 nitroindole | Pseudo-uridine-N1-methy1-p-benzoic acid |
| 5 substituted pyrimidines | Pseudo-uridine-N1-p-benzoic acid |
| 5-(1,3-diazole-1-alkyl)uracil | Pseudo-uridine-N1-7-heptanoic acid |
| 5-(1-Propynyl)ara-cytidine | pyrenyl |
| 5-(1-Propynyl)ara-uridine | pyridin-4-one ribonucleoside |
| 5-(2-aminopropyl)uracil | pyridopyrimidin-3-yl |
| 5-(2-carbomethoxyvinyl)uridine | pyridopyrimidin-3-yl,2-oxo-7-amino- |
| | pyridopyrimidin-3-yl |
| 5-(2-Chloro-phenyl)-2-thiocytidine | pyrrolo-cytidine |
| 5-(2-Furanyl)uridine | pyrrolo-pseudoisocytidine |
| 5-(4-Amino-phenyl)-2-thiocytidine | pyrrolo-pyrimidin-2-on-3-yl |
| 5-(alky1)-2-(thio)pseudouracil | pyrrolopyrimidinyl |
| 5-(alky1)-4(thio)pseudouracil | pyrrolopyrizinyl |
| 5-(alkyl)-2,4(dithio)pseudouracil | Pyrrolosine |
| 5-(alkyl)cytosine | siloxane backbones |
| 5-(alkyl)pseudouracil | stilbenzyl |
| 5-(alkyl)uracil | substituted 1,2,4-triazoles |
| 5-(alkynyl)cytosine | sulfamate backbones |
| 5-(alkynyl)uracil | sulfide sulfoxide and sulfone backbones |
| 5-(allylamino)uracil | sulfonate and sulfonamide backbones |
| 5-(aminoalkyl)uracil | tetracenyl |
| 5-(carboxyhydroxymethyl)uridine | thio-adenosine |
| 5-(carboxyhydroxymethyl)uridine methyl | thionoalkylphosphonates |
| ester | |
| 5-(cyanoalkyl)uracil | thionoalkylphosphotriesters |
| 5-(dialkylaminoalkyl)uracil | thionophosphoramidates |
| 5-(dimethylaminoalkyl)uracil | Tricyclo-DNA (tcDNA) |
| 5-(guanidiniumalkyl)uracil | tubercidine |
| 5-(halo)cytosine | undermodified hydroxywybutosine |
| 5-(halo)uracil | uridine 5-oxyacetic acid |
| 5-(iso-Pentenylaminomethyl)-2-thiouridine | uridine 5-oxyacetic acid methyl ester |
| 5-(iso-Pentenylaminomethyl)-2′-O- | wybutosine |
| methyluridine | |
| 5-(iso-Pentenylaminomethyl)uridine | wyosme |
| 5-(1,3-diazole-1-alkyl)uracil | xanthine |
| 5-(methoxy)uracil | Xanthosine |
| 5-(methoxycarbonylmethyl)-2-(thio)uracil | zebularine |

[0307] A TREM may comprise a non-naturally occurring modification in each of the ASt Domain1, the DH Domain, the ACH Domain, the VL Domain, the TH Domain, and the ASt Domain2. In some embodiments, the TREM comprises 0-10, 10-20, 20-30, 30-40, 40-50, 50-60, 60-70, 70-80, or 80-90 non-naturally occurring modifications. In some embodiments, the TREM comprises 0, 1, 2, 3, 4, 5, 6, 7, 8, 9, 10, 11, 12, 13, 14, 15, 16, 17, 18, 19, 20, 21, 22, 23, 24, 25, 26, 27, 28, 29, 30, 31, 32, 33, 34, 35, 36, 37, 38, 39, 40, 41, 42, 43, 44, 45, 46, 47, 48, 49, 50, 51, 52, 53, 54, 55, 56, 57, 58, 59, 60, 61, 62, 63, 64, 65, 66, 67, 68, 69, 70, 71, 72, 73, 74, 75, 76, 77, 78, 79, 80, 81, 82, 83, 84, 85, 86, 87, 88, 89, or 90 non-naturally occurring modifications. In some embodiments, the TREM comprises a non-naturally occurring modification in each of the ASt Domain1, the DH Domain, the TH Domain, and the ASt Domain2. In some embodiments, the TREM comprises a non-naturally occurring modification in each of the ASt Domain1, the ACH Domain, the TH Domain, and the ASt Domain2. In some embodiments, the TREM comprises a non-naturally occurring modification in each of the ASt Domain1 and the ASt Domain2. In some embodiments, the TREM comprises a non-naturally occurring modification in each of the ASt Domain1, the VL Domain, the TH Domain, and the ASt Domain2. In some embodiments, the TREM comprises a non-naturally occurring modification in each of the ASt Domain1, the DH Domain, and the ASt Domain2. In some embodiments, the TREM comprises a non-naturally occurring modification in each of the ASt Domain1, the TH Domain, and the ASt Domain2. In some embodiments, the TREM comprises a non-naturally occurring modification in each of the ASt Domain1, the DH Domain, the ACH Domain, the TH Domain, and the ASt Domain2. In some embodiments, the TREM comprises a non-naturally occurring modification in each of the ASt Domain1, the ACH Domain, and the ASt Domain2. In some embodiments, the TREM comprises a non-naturally occurring modification in each of the ASt Domain1, the ACH Domain, the VL Domain, the TH Domain, and the ASt Domain2. In some embodiments, the TREM comprises a non-naturally occurring modification in the ASt Domain1. In some embodiments, the TREM comprises a non-naturally occurring modification in the DH Domain. In some embodiments, the TREM comprises a non-naturally occurring modification in the ACH Domain. In some embodiments, the TREM comprises a non-naturally occurring modification in the VL Domain. In some embodiments, the TREM comprises a non-naturally occurring modification in the TH Domain. In some embodiments, the TREM comprises a non-naturally occurring modification in the ASt Domain2.

[0308] In some embodiments, the TREM comprises a nucleotide sugar modification in each of the ASt Domain1, the DH Domain, the ACH Domain, the VL Domain, the TH Domain, and the ASt Domain2. In some embodiments, the nucleotide sugar modification comprises a 2′-O-methyl modification. In some embodiments, the nucleotide sugar modification comprises a 2′-fluoro modification. In some embodiments, the TREM comprises 0-5, 5-10, 10-20, or 20-30 2′-O-methyl modifications. In some embodiments, the TREM comprises 0, 1, 2, 3, 4, 5, 6, 7, 8, 9, 10, 11, 12, 13, 14, 15, 16, 17, 18, 19, 20, 21, 22, 23, 24, 25, 26, 27, 28, 29, or 30 2′-O-methyl modifications. In some embodiments, the TREM comprises 0-5, 5-10, 10-20, or 20-30 2′-fluoro modifications. In some embodiments, the TREM comprises 0, 1, 2, 3, 4, 5, 6, 7, 8, 9, 10, 11, 12, 13, 14, 15, 16, 17, 18, 19, 20, 21, 22, 23, 24, 25, 26, 27, 28, 29, or 30 2′-fluoro modifications. In some embodiments, the TREM comprises a 2′-O-methyl modification in each of the ASt Domain1, the DH Domain, the ACH Domain, the VL Domain, the TH Domain, and the ASt Domain2. In some embodiments, the TREM comprises a 2′-O-methyl modification in each of the ASt Domain1, the TH Domain, and the ASt Domain2. In some embodiments, the TREM comprises a 2′-O-methyl modification in each of the ASt Domain1 and the ASt Domain2. In some embodiments, the TREM comprises a 2′-O-methyl modification in each of the ASt Domain1, the DH Domain, and the ASt Domain2. In some embodiments, the TREM comprises a 2′-O-methyl modification in each of the ASt Domain1, the DH Domain, the ACH Domain, and the ASt Domain2. In some embodiments, the TREM comprises a 2′-O-methyl modification in each of the ASt Domain1, the ACH Domain, and the ASt Domain2. In some embodiments, the TREM comprises a 2′-O-methyl modification in each of the ASt Domain1, the DH Domain, the TH Domain, and the ASt Domain2. In some embodiments, the TREM comprises a 2′-O-methyl modification in the ASt Domain1. In some embodiments, the TREM comprises a 2′-fluoro modification in each of the ASt Domain1, the DH Domain, the ACH Domain, the VL Domain, the TH Domain, and the ASt Domain2. In some embodiments, the TREM comprises a 2′-fluoro modification in each of the DH Domain and the TH Domain. In some embodiments, the TREM comprises a 2′-fluoro modification in each of the VL Domain, the TH Domain, and the ASt Domain2. In some embodiments, the TREM comprises a 2′-fluoro modification in each of the DH Domain, the ACH Domain, the TH Domain, and the ASt Domain2. In some embodiments, the TREM comprises a 2′-fluoro modification in each of the DH Domain, the ACH Domain, the VL Domain, and the TH Domain. In some embodiments, the TREM comprises a 2′-fluoro modification in each of the ASt Domain1, the DH Domain, the ACH Domain, and the ASt Domain2. In some embodiments, the TREM comprises a 2′-fluoro modification in each of the DH Domain, the TH Domain, and the ASt Domain2. In some embodiments, the TREM comprises a 2′-fluoro modification in each of the DH Domain, the ACH Domain, the VL Domain, and the ASt Domain2. In some embodiments, the TREM comprises a 2′-fluoro modification in each of the ASt Domain1, the ACH Domain, the VL Domain, the TH Domain, and the ASt Domain2. In some embodiments, the TREM comprises a 2′-fluoro modification in the ASt Domain1. In some embodiments, the TREM comprises a 2′-fluoro modification in the DH Domain. In some embodiments, the TREM comprises a 2′-fluoro modification in the ACH Domain. In some embodiments, the TREM comprises a 2′-fluoro modification in the TH Domain. In some embodiments, the TREM comprises a 2′-fluoro modification in the ASt Domain2.

[0309] In some embodiments, the TREM comprises an internucleotide modification in each of the ASt Domain1, the DH Domain, the ACH Domain, the VL Domain, the TH Domain, and the ASt Domain2. In some embodiments, the internucleotide modification comprises a phosphorothioate linkage. In some embodiments, the TREM comprises 0-5, 5-10, 10-20, or 20-30 phosphorothioate linkages. In some embodiments, the TREM comprises 0, 1, 2, 3, 4, 5, 6, 7, 8, 9, 10, 11, 12, 13, 14, 15, 16, 17, 18, 19, 20, 21, 22, 23, 24, 25, 26, 27, 28, 29, or 30 phosphorothioate linkages. In some embodiments, the TREM comprises a phosphorothioate linkage in each of the ASt Domain1, the ACH Domain, the TH Domain, and the ASt Domain2. In some embodiments, the TREM comprises a phosphorothioate linkage in each of the ASt Domain1 and the ASt Domain2. In some embodiments, the TREM comprises a phosphorothioate linkage in each of the ASt Domain1, the TH Domain, and the ASt Domain2. In some embodiments, the TREM comprises a phosphorothioate linkage in each of the ASt Domain1, the DH Domain, the TH Domain, and the ASt Domain2. In some embodiments, the TREM comprises a phosphorothioate linkage in each of the ASt Domain1, the ACH Domain, the VL Domain, and the ASt Domain2. In some embodiments, the TREM comprises a phosphorothioate linkage in each of the ASt Domain1, the DH Domain, the ACH Domain, TH Domain, and the ASt Domain2. In some embodiments, the TREM comprises a phosphorothioate linkage in each of the ASt Domain1, the DH Domain, the VL Domain, and the TH Domain. In some embodiments, the TREM comprises a phosphorothioate linkage in each of the ASt Domain1, the DH Domain, and the ASt Domain2. In some embodiments, the TREM comprises a phosphorothioate linkage in the ACH Domain.

[0310] A TREM may comprise a non-naturally occurring modification (e.g., a nucleotide sugar modification or an internucleotide modification) in each of the ASt Domain1, the DH Domain, the ACH Domain, the VL Domain, the TH Domain, or the ASt Domain2. In some embodiments, the TREM comprises the non-naturally occurring modification pattern of Pattern No: 1 in Table 6:1-m, 18-m, 19-m, 50-m, 52-m, 73-m. In some embodiments, the TREM comprises the non-naturally occurring modification pattern of Pattern No: 2 in Table 6:1-m*, 2-m*, 43-*, 55-*, 74-*, 75-m. In some embodiments, the TREM comprises the non-naturally occurring modification pattern of Pattern No: 3 in Table 6:1-m*, 2-m*, 74-*, 75-m. In some embodiments, the TREM comprises the non-naturally occurring modification pattern of Pattern No: 4 in Table 6:1-m*, 2-m*, 27-*, 51-*, 59-f, 74-*, 75-m. In some embodiments, the TREM comprises the non-naturally occurring modification pattern of Pattern No: 5 in Table 6:1-m*, 2-m*, 13-f, 14-f, 54-f, 59-m, 73-*, 75-*, 76-m. In some embodiments, the TREM comprises the non-naturally occurring modification pattern of Pattern No: 6 in Table 6:1-m*, 2-m*, 45-f, 57-f, 68-f, 74-*, 75-m*, 76-m. In some embodiments, the TREM comprises the non-naturally occurring modification pattern of Pattern No: 7 in Table 6:1-m*, 2-m, 74-*, 75-m. In some embodiments, the TREM comprises the non-naturally occurring modification pattern of Pattern No: 8 in Table 6:1-m*, 2-m*, 27-*, 51-*, 59-f, 73-*, 74-*, 75-m. In some embodiments, the TREM comprises the non-naturally occurring modification pattern of Pattern No: 9 in Table 6:1-m*, 2-m, 25-f, 74-*, 75-m. In some embodiments, the TREM comprises the non-naturally occurring modification pattern of Pattern No: 10 in Table 6:1-m*, 2-m*, 13-f, 14-f, 54-f, 59-m, 75-*, 76-m. In some embodiments, the TREM comprises the non-naturally occurring modification pattern of Pattern No: 11 in Table 6:1-m*, 2-m, 73-*, 74-*, 75-m. In some embodiments, the TREM comprises the non-naturally occurring modification pattern of Pattern No: 12 in Table 6:1-m*, 2-m*, 52-m, 63-*, 74-*, 75-m*, 76-m. In some embodiments, the TREM comprises the non-naturally occurring modification pattern of Pattern No: 13 in Table 6:1-m*, 2-m, 13-*, 14-m, 55-*, 74-*, 75-m. In some embodiments, the TREM comprises the non-naturally occurring modification pattern of Pattern No: 14 in Table 6:1-m*, 2-m*, 12-*, 13-f*, 23-*, 24-f, 43-f, 52-*, 59-m*, 61-f, 68-f, 70-f, 74-*, 75-m. In some embodiments, the TREM comprises the non-naturally occurring modification pattern of Pattern No: 15 in Table 6:1-m*, 2-m*, 14-f, 16-f, 22-f, 24-f, 40-*, 43-f, 44-f, 45-f*, 52-f, 61-f, 74-*. In some embodiments, the TREM comprises the non-naturally occurring modification pattern of Pattern No: 16 in Table 6:1-m, 40-f, 41-m*, 42-f, 43-m*, 73-m. In some embodiments, the TREM comprises the non-naturally occurring modification pattern of Pattern No: 17 in Table 6:1-m*, 2-m, 74-*, 75-m. In some embodiments, the TREM comprises the non-naturally occurring modification pattern of Pattern No: 18 in Table 6:1-m*, 2-m. In some embodiments, the TREM comprises the non-naturally occurring modification pattern of Pattern No: 19 in Table 6:1-m*, 2-m*, 75-*, 76-m. In some embodiments, the TREM comprises the non-naturally occurring modification pattern of Pattern No: 20 in Table 6:1-m*, 2-m*, 52-*, 74-*, 75-m. In some embodiments, the TREM comprises the non-naturally occurring modification pattern of Pattern No: 21 in Table 6:1-m*, 2-m*, 13-f, 14-f, 54-f, 59-m, 75-*, 76-m. In some embodiments, the TREM comprises the non-naturally occurring modification pattern of Pattern No: 22 in Table 6:1-m*, 2-m, 46-f, 59-m, 75-*, 76-m. In some embodiments, the TREM comprises the non-naturally occurring modification pattern of Pattern No: 23 in Table 6:1-m*, 2-m*, 14-f, 16-f, 22-f, 24-f, 40-*, 43-f, 44-f, 45-f*, 52-f, 61-f, 74-*. In some embodiments, the TREM comprises the non-naturally occurring modification pattern of Pattern No: 24 in Table 6:1-m*, 2-m*, 12-*, 13-f*, 23-*, 24-f, 43-f, 52-*, 59-m*, 61-f, 68-f, 70-f, 74-*, 75-m. In some embodiments, the TREM comprises the non-naturally occurring modification pattern of Pattern No: 25 in Table 6:1-m*, 2-f, 20-*, 20a-f, 23-*, 24-f, 28-f, 38-*, 39-f, 52-*, 61-f, 66-*, 74-*, 75-m. In some embodiments, the TREM comprises the non-naturally occurring modification pattern of Pattern No: 26 in Table 6:1-m*, 2-m, 13-*, 14-f, 22-f, 23-f, 27-f*, 40-m*, 41-f, 44-f, 56-*, 74-*, 75-*. In some embodiments, the TREM comprises the non-naturally occurring modification pattern of Pattern No: 27 in Table 6:1-m*, 2-m, 12-m, 13-*, 22-f, 23-f, 27-*, 28-f, 40-*, 41-f, 46-f, 56-m, 64-*, 65-*, 68-f, 74-*, 75-m. In some embodiments, the TREM comprises the non-naturally occurring modification pattern of Pattern No: 28 in Table 6:1-m*, 2-f*, 19-f, 20-f, 20a-f, 23-*, 24-f*, 25-*, 27-f, 31-f, 34-f, 44-f, 49-f*, 64-f*, 68-f, 72-f, 76-m. In some embodiments, the TREM comprises the non-naturally occurring modification pattern of Pattern No: 29 in Table 6:1-m*, 13-f*, 20-*, 20a-f, 28-f, 40-f, 42-f, 53-f*, 68-f, 75-*, 76-f. In some embodiments, the TREM comprises the non-naturally occurring modification pattern of Pattern No: 30 in Table 6:1-m*, 4-f*, 28-m, 43-f, 46-f, 56-f, 61-f, 62-f, 74-f *. In some embodiments, the TREM comprises the non-naturally occurring modification pattern of Pattern No: 31 in Table 6: 1-f*, 2-m*, 12-m, 13-*, 16-f, 22-f, 23-f, 28-f, 29-m, 44-f, 54-f*, 66-*, 67-*, 68-f, 74-*, 75-m, 76-f. In some embodiments, the TREM comprises the non-naturally occurring modification pattern of Pattern No: 32 in Table 6:1-m*, 2-m*, 12-*, 20-f, 22-f, 23-f, 31-m, 51-*, 52-f, 64-*, 67-f, 74-*, 75-m. In some embodiments, the TREM comprises the non-naturally occurring modification pattern of Pattern No: 33 in Table 6:74-f. In some embodiments, the TREM comprises the non-naturally occurring modification pattern of Pattern No: 34 in Table 6:75-f. In some embodiments, the TREM comprises the non-naturally occurring modification pattern of Pattern No: 35 in Table 6:1-m, 2-m, 3-m, 4-m, 13-m, 18-m, 19-m, 50-m, 52-m, 66-m, 73-m. In some embodiments, the TREM comprises the non-naturally occurring modification pattern of Pattern No: 36 in Table 6:76-f. In some embodiments, the TREM comprises the non-naturally occurring modification pattern of Pattern No: 37 in Table 6:1-m, 2-m, 3-m, 4-m, 13-m, 18-m, 19-m, 50-m, 52-m, 73-m. In some embodiments, the TREM comprises the non-naturally occurring modification pattern of Pattern No: 38 in Table 6:1-m*, 2-m*, 30-m*, 43-m, 46-m*, 52-f*, 54-*, 73-m. In some embodiments, the TREM comprises the non-naturally occurring modification pattern of Pattern No: 39 in Table 6:1-m*, 2-*, 25-f*, 30-*, V24-m*, 49-*, 53-m, 71-m, 74-*. In some embodiments, the TREM comprises the non-naturally occurring modification pattern of Pattern No: 40 in Table 6:1-m*, 2-m, 4-m, 15-m, 18-*, 27-f, 49-m*, 53-m. In some embodiments, the TREM comprises the non-naturally occurring modification pattern of Pattern No: 41 in Table 6:1-m*, 2-*, 19-*, 24-f, 37-*, V23-m, 73-m*. In some embodiments, the TREM comprises the non-naturally occurring modification pattern of Pattern No: 42 in Table 6:1-m*, 2-m*, 8-f, 14-m*, 24-*, 30-f*, 52-*, 54-m.

TABLE 6
Exemplary non-naturally occurring modification patterns of TREMs

| Pattern | |
|---|---|
| No. | Modification Pattern |
| 1 | 1-m, 18-m, 19-m, 50-m, 52-m, 73-m |
| 2 | 1-m*, 2-m*, 43-*, 55-*, 74-*, 75-m |
| 3 | 1-m*, 2-m*, 74-*, 75-m |
| 4 | 1-m*, 2-m*, 27-*, 51-*, 59-f, 74-*, 75-m |
| 5 | 1-m*, 2-m*, 13-f, 14-f, 54-f, 59-m, 73-*, 75-*, 76-m |
| 6 | 1-m*, 2-m*, 45-f, 57-f, 68-f, 74-*, 75-m*, 76-m |
| 7 | 1-m*, 2-m, 74-*, 75-m |
| 8 | 1-m*, 2-m*, 27-*, 51-*, 59-f, 73-*, 74-*, 75-m |
| 9 | 1-m*, 2-m, 25-f, 74-*, 75-m |
| 10 | 1-m*, 2-m*, 13-f, 14-f, 54-f, 59-m, 75-*, 76-m |
| 11 | 1-m*, 2-m, 73-*, 74-*, 75-m |
| 12 | 1-m*, 2-m*, 52-m, 63-*, 74-*, 75-m*, 76-m |
| 13 | 1-m*, 2-m, 13-*, 14-m, 55-*, 74-*, 75-m |
| 14 | 1-m*, 2-m*, 12-*, 13-f*, 23-*, 24-f, 43-f, 52-*, 59-m*, 61-f, 68-f, 70-f, 74-*, 75-m |
| 15 | 1-m*, 2-m*, 14-f, 16-f, 22-f, 24-f, 40-*, 43-f, 44-f, 45-f*, 52-f, 61-f, 74-* |
| 16 | 1-m, 40-f, 41-m*, 42-f, 43-m*, 73-m |
| 17 | 1-m*, 2-m, 74-*, 75-m |
| 18 | 1-m*, 2-m |
| 19 | 1-m*, 2-m*, 75-*, 76-m |
| 20 | 1-m*, 2-m*, 52-*, 74-*, 75-m |
| 21 | 1-m*, 2-m*, 13-1, 14-1, 54-1, 59-m, 75-*, 76-m |
| 22 | 1-m*, 2-m, 46-f, 59-m, 75-*, 76-m |
| 23 | 1-m*, 2-m*, 14-f, 16-f, 22-f, 24-f, 40-*, 43-f, 44-f, 45-f*, 52-f, 61-f, 74-* |
| 24 | 1-m*, 2-m*, 12-*, 13-f*, 23-*, 24-f, 43-f, 52-*, 59-m*, 61-f, 68-f, 70-f, 74-*, 75-m |
| 25 | 1-m*, 2-f, 20-*, 20a-f, 23-*, 24-f, 28-f, 38-*, 39-f, 52-*, 61-f, 66-*, 74-*, 75-m |
| 26 | 1-m*, 2-m, 13-*, 14-f, 22-f, 23-f, 27-f*, 40-m*, 41-f, 44-f, 56-*, 74-*, 75-* |
| 27 | 1-m*, 2-m, 12-m, 13-*, 22-f, 23-f, 27-*, 28-f, 40-*, 41-f, 46-f, 56-m, 64-*, 65-*, 68- |
| | f, 74-*, 75-m |
| 28 | 1-m*, 2-f*, 19-f, 20-f, 20a-f, 23-*, 24-f*, 25-*, 27-f, 31-f, 34-f, 44-f, 49-f*, 64-f*, |
| | 68-f, 72-f, 76-m |
| 29 | 1-m*, 13-f*, 20-*, 20a-f, 28-f, 40-f, 42-f, 53-f*, 68-f, 75-*, 76-f |
| 30 | 1-m*, 4-f*, 28-m, 43-f, 46-f, 56-f, 61-f, 62-f, 74-f* |
| 31 | 1-f*, 2-m*, 12-m, 13-*, 16-1, 22-1, 23-1, 28-1, 29-m, 44-1, 54-f*, 66-*, 67-*, 68-f, |
| | 74-*, 75-m, 76-f |
| 32 | 1-m*, 2-m*, 12-*, 20-f, 22-f, 23-f, 31-m, 51-*, 52-f, 64-*, 67-f, 74-*, 75-m |
| 33 | 74-f |
| 34 | 75-f |
| 35 | 1-m, 2-m, 3-m, 4-m, 13-m, 18-m, 19-m, 50-m, 52-m, 66-m, 73-m |
| 36 | 76-f |
| 37 | 1-m, 2-m, 3-m, 4-m, 13-m, 18-m, 19-m, 50-m, 52-m, 73-m |
| 38 | 1-m*, 2-m*, 30-m*, 43-m, 46-m*, 52-f*, 54-*, 73-m |
| 39 | 1-m*, 2-*, 25-f*, 30-*, V24-m*, 49-*, 53-m, 71-m, 74-* |
| 40 | 1-m*, 2-m, 4-m, 15-m, 18-*, 27-f, 49-m*, 53-m |
| 41 | 1-m*, 2-*, 19-*, 24-f, 37-*, V23-m, 73-m* |
| 42 | 1-m*, 2-m*, 8-f, 14-m*, 24-*, 30-f*, 52-*, 54-m |

[0311] A TREM may not comprise a non-naturally occurring modification (e.g., a nucleotide sugar modification or an internucleotide modification) in each of the ASt Domain1, the DH Domain, the ACH Domain, the VL Domain, the TH Domain, or the ASt Domain2. In some embodiments, the TREM does not comprise a non-naturally occurring modification in the ASt Domain1. In some embodiments, the TREM does not comprise a non-naturally occurring modification in the DH Domain. In some embodiments, the TREM does not comprise a non-naturally occurring modification in the ACH Domain. In some embodiments, the TREM does not comprise a non-naturally occurring modification in the VL Domain. In some embodiments, the TREM does not comprise a non-naturally occurring modification in the TH Domain. In some embodiments, the TREM does not comprise a non-naturally occurring modification in the ASt Domain2. In some embodiments, the TREM has 70%, 75%, 80%, 85%, 90%, 95%, or 99% identity to SEQ ID NO: 622. In some embodiments, the TREM has 70%, 75%, 80%, 85%, 90%, 95%, or 99% identity to SEQ ID NO: 650. In some embodiments, the TREM has 70%, 75%, 80%, 85%, 90%, 95%, or 99% identity to SEQ ID NO: 653.

### TREM, TREM Core Fragment and TREM Fragment Fusions

[0312] In an embodiment, a TREM, a TREM core fragment or a TREM fragment disclosed herein comprises an additional moiety, e.g., a fusion moiety. In an embodiment, the fusion moiety can be used for purification, to alter folding of the TREM, TREM core fragment or TREM fragment, or as a targeting moiety. In an embodiment, the fusion moiety can comprise a tag, a linker, can be cleavable or can include a binding site for an enzyme. In an embodiment, the fusion moiety can be disposed at the N terminal of the TREM or at the C terminal of the TREM,

[0313] TREM core fragment or TREM fragment. In an embodiment, the fusion moiety can be encoded by the same or different nucleic acid molecule that encodes the TREM, TREM core fragment or TREM fragment.

### TREM Consensus Sequence

[0314] In an embodiment, a TREM disclosed herein comprises a consensus sequence provided herein.

[0315] In an embodiment, a TREM disclosed herein comprises a consensus sequence of Formula I _{ZZZ}, wherein _{ZZZ} indicates any of the twenty amino acids and Formula I corresponds to all species.

[0316] In an embodiment, a TREM disclosed herein comprises a consensus sequence of Formula II _{ZZZ}, wherein _{ZZZ} indicates any of the twenty amino acids and Formula II corresponds to mammals.

[0317] In an embodiment, a TREM disclosed herein comprises a consensus sequence of Formula III _{ZZZ}, wherein _{ZZZ} indicates any of the twenty amino acids and Formula III corresponds to humans.

[0318] In an embodiment, _{ZZZ} indicates any of the twenty amino acids: alanine, arginine, asparagine, aspartate, cysteine, glutamine, glutamate, glycine, histidine, isoleucine, methionine, leucine, lysine, phenylalanine, proline, serine, threonine, tryptophan, tyrosine, or valine.

[0319] In an embodiment, a TREM disclosed herein comprises a property selected from the following:
[0320] a) under physiological conditions residue R₀ forms a linker region, e.g., a Linker 1 region;
[0321] b) under physiological conditions residues R₁-R₂-R₃-R₄-R₅-R₆-R₇ and residues R₆₅-R₆₆-R₆₇-R₆₈-R₆₉-R₇₀-R₇₁ form a stem region, e.g., an AStD stem region;
[0322] c) under physiological conditions residues R₈-R₉ forms a linker region, e.g., a Linker 2 region;
[0323] d) under physiological conditions residues-R₁₀-R₁₁-R₁₂-R₁₃-R₁₄ R₁₅-R₁₆-R₁₇-R₁₈-R₁₉-R₂₀-R₂₁-R₂₂-R₂₃-R₂₄-R₂₅-R₂₆-R₂₇-R₂₈ form a stem-loop region, e.g., a D arm Region;
[0324] e) under physiological conditions residue-R₂₉ forms a linker region, e.g., a Linker 3 Region;
[0325] f) under physiological conditions residues-R₃₀-R₃₁-R₃₂-R₃₃-R₃₄-R₃₅-R₃₆-R₃₇-R₃₈-R₃₉-R₄₀-R₄₁-R₄₂-R₄₃-R₄₄-R₄₅-R₄₆ form a stem-loop region, e.g., an AC arm region;
[0326] g) under physiological conditions residue-[R₄₇]ₓ comprises a variable region, e.g., as described herein;
[0327] h) under physiological conditions residues-R₄₈-R₄₉-R₅₀-R₅₁-R₅₂-R₅₃-R₅₄-R₅₅-R₅₆-R₅₇-R₅₈-R₅₉-R₆₀-R₆₁-R₆₂-R₆₃-R₆₄ form a stem-loop region, e.g., a T arm Region; or
[0328] i) under physiological conditions residue R₇₂ forms a linker region, e.g., a Linker 4 region.

### Alanine TREM Consensus Sequence

[0329] In an embodiment, a TREM disclosed herein comprises the sequence of Formula I_{ALA} (SEQ ID NO: 562),

[0330] R₀-R₁-R₂-R₃-R₄-R₅-R₆-R₇-R₈-R₉-R₁₀-R₁₁-R₁₂-R₁₃-R₁₄-R₁₅-R₁₆-R₁₇-R₁₈-R₁₉-R₂₀-R₂₁-R₂₂-R₂₃-R₂₄-R₂₅-R₂₆-R₂₇-R₂₈-R₂₉-R₃₀-R₃₁-R₃₂-R₃₃-R₃₄-R₃₅-R₃₆-R₃₇-R₃₈-R₃₉-R₄₀-R₄₁-R₄₂-R₄₃- R₄₄-R₄₅-R₄₆-[R₄₇]ₓ-R₄₈-R₄₉-R₅₀-R₅₁-R₅₂-R₅₃-R₅₄-R₅₅-R₅₆-R₅₇-R₅₈-R₅₉-R₆₀-R₆₁-R₆₂-R₆₃-R₆₄-R₆₅- R₆₆-R₆₇-R₆₈-R₆₉-R₇₀-R₇₁-R₇₂

wherein R is a ribonucleotide residue and the consensus for Ala is:
[0331] R₀=absent;
[0332] R₁₄, R₅₇=are independently A or absent;
[0333] R₂₆=A, C, G or absent;
[0334] R₅, R₆, R₁₅, R₁₆, R₂₁, R₃₀, R₃₁, R₃₂, R₃₄, R₃₇, R₄₁, R₄₂, R₄₃, R₄₄, R₄₅, R₄₈, R₄₉, R₅₀, R₅₈, R₅₉, R₆₃, R₆₄, R₆₆, R₆₇=are independently N or absent;
[0335] R₁₁, R₃₅, R₆₅=are independently A, C, U or absent;
[0336] R₁, R₉, R₂₀, R₃₈, R₄₀, R₅₁, R₅₂, R₅₆=are independently A, G or absent;
[0337] R₇, R₂₂, R₂₅, R₂₇, R₂₉, R₄₆, R₅₃, R₇₂=are independently A, G, U or absent;
[0338] R₂₄, R₆₉=are independently A, U or absent;
[0339] R₇₀, R₇₁=are independently C or absent;
[0340] R₃, R₄=are independently C, G or absent;
[0341] R₁₂, R₃₃, R₃₆, R₆₂, R₆₈=are independently C, G, U or absent;
[0342] R₁₃, R₁₇, R₂₈, R₃₉, R₅₅, R₆₀, R₆₁=are independently C, U or absent;
[0343] R₁₀, R₁₉, R₂₃=are independently G or absent;
[0344] R₂=G, U or absent;
[0345] R₈, R₁₈, R₅₄=are independently U or absent;
[0346] [R₄₇]ₓ=N or absent;
[0347] wherein, e.g., x=1-271 (e.g., x=1-250, x=1-225, x=1-200, x=1-175, x=1-150, x=1-125, x=1-100, x=1-75, x=1-50, x=1-40, x=1-30, x=1-29, x=1-28, x=1-27, x=1-26, x=1-25, x=1-24, x=1-23, x=1-22, x=1-21, x=1-20, x=1-19, x=1-18, x=1-17, x=1-16, x=1-15, x=1-14, x=1-13, x=1-12, x=1-11, x=1-10, x=10-271, x=20-271, x=30-271, x=40-271, x=50-271, x=60-271, x=70-271, x=80-271, x=100-271, x=125-271, x=150-271, x=175-271, x=200-271, x=225-271, x=1, x=2, x=3, x=4, x=5, x=6, x=7, x=8, x=9, x=10, x=11, x=12, x=13, x=14, x=15, x=16, x=17, x=18, x=19, x=20, x=21, x=22, x=23, x=24, x=25, x=26, x=27, x=28, x=29, x=30, x=40, x=50, x=60, x=70, x=80, x=90, x=100, x=110, x=125, x=150, x=175, x=200, x=225, x=250, or x=271), provided that the TREM has one or both of the following properties: no more than 15% of the residues are N; or no more than 20 residues are absent.

[0348] In an embodiment, a TREM disclosed herein comprises the sequence of Formula II_{ALA} (SEQ ID NO: 563),
[0349] R₀-R₁-R₂-R₃-R₄-R₅-R₆-R₇-R₈-R₉-R₁₀-R₁₁-R₁₂-R₁₃-R₁₄-R₁₅-R₁₆-R₁₇-R₁₈-R₁₉-R₂₀-R₂₁-R₂₂-R₂₃-R₂₄-R₂₅-R₂₆-R₂₇-R₂₈-R₂₉-R₃₀-R₃₁-R₃₂-R₃₃-R₃₄-R₃₅-R₃₆-R₃₇-R₃₈-R₃₉-R₄₀-R₄₁-R₄₂-R₄₃- R₄₄-R₄₅-R₄₆-[R₄₇]ₓ-R₄₈-R₄₉-R₅₀-R₅₁-R₅₂-R₅₃-R₅₄-R₅₅-R₅₆-R₅₇-R₅₈-R₅₉-R₆₀-R₆₁-R₆₂-R₆₃-R₆₄-R₆₅- R₆₆-R₆₇-R₆₈-R₆₉-R₇₀-R₇₁-R₇₂
   wherein R is a ribonucleotide residue and the consensus for Ala is:
[0350] R₀, R₁₈=are absent;
[0351] R₁₄, R₂₄, R₅₇=are independently A or absent;
[0352] R₁₅, R₂₆, R₆₄=are independently A, C, G or absent;
[0353] R₁₆, R₃₁, R₅₀, R₅₉=are independently N or absent;
[0354] R₁₁, R₃₂, R₃₇, R₄₁, R₄₃, R₄₅, R₄₉, R₆₅, R₆₆=are independently A, C, U or absent;
[0355] R₁, R₅, R₉, R₂₅, R₂₇, R₃₈, R₄₀, R₄₆, R₅₁, R₅₆=are independently A, G or absent;
[0356] R₇, R₂₂, R₂₉, R₄₂, R₄₄, R₅₃, R₆₃, R₇₂=are independently A, G, U or absent;
[0357] R₆, R₃₅, R₆₉=are independently A, U or absent;
[0358] R₅₅, R₆₀, R₇₀, R₇₁=are independently C or absent;
[0359] R₃=C, G or absent;
[0360] R₁₂, R₃₆, R₄₈=are independently C, G, U or absent;
[0361] R₁₃, R₁₇, R₂₈, R₃₀, R₃₄, R₃₉, R₅₈, R₆₁, R₆₂, R₆₇, R₆₈=are independently C, U or absent;
[0362] R₄, R₁₀, R₁₉, R₂₀, R₂₃, R₅₂=are independently G or absent;
[0363] R₂, R₈, R₃₃=are independently G, U or absent;
[0364] R₂₁, R₅₄=are independently U or absent;
[0365] [R₄₇]ₓ=N or absent;
[0366] wherein, e.g., x=1-271 (e.g., x=1-250, x=1-225, x=1-200, x=1-175, x=1-150, x=1-125, x=1-100, x=1-75, x=1-50, x=1-40, x=1-30, x=1-29, x=1-28, x=1-27, x=1-26, x=1-25, x=1-24, x=1-23, x=1-22, x=1-21, x=1-20, x=1-19, x=1-18, x=1-17, x=1-16, x=1-15, x=1-14, x=1-13, x=1-12, x=1-11, x=1-10, x=10-271, x=20-271, x=30-271, x=40-271, x=50-271, x=60-271, x=70-271, x=80-271, x=100-271, x=125-271, x=150-271, x=175-271, x=200-271, x=225-271, x=1, x=2, x=3, x=4, x=5, x=6, x=7, x=8, x=9, x=10, x=11, x=12, x=13, x=14, x=15, x=16, x=17, x=18, x=19, x=20, x=21, x=22, x=23, x=24, x=25, x=26, x=27, x=28, x=29, x=30, x=40, x=50, x=60, x=70, x=80, x=90, x=100, x=110, x=125, x=150, x=175, x=200, x=225, x=250, or x=271), provided that the TREM has one or both of the following properties: no more than 15% of the residues are N; or no more than 20 residues are absent.

[0367] In an embodiment, a TREM disclosed herein comprises the sequence of Formula III_{ALA} (SEQ ID NO: 564),

[0368] R₀-R₁-R₂-R₃-R₄-R₅-R₆-R₇-R₈-R₉-R₁₀-R₁₁-R₁₂-R₁₃-R₁₄-R₁₅-R₁₆-R₁₇-R₁₈-R₁₉-R₂₀-R₂₁-R₂₂-R₂₃-R₂₄-R₂₅-R₂₆-R₂₇-R₂₈-R₂₉-R₃₀-R₃₁-R₃₂-R₃₃-R₃₄-R₃₅-R₃₆-R₃₇-R₃₈-R₃₉-R₄₀-R₄₁-R₄₂-R₄₃- R₄₄-R₄₅-R₄₆-[R₄₇]ₓ-R₄₈-R₄₉-R₅₀-R₅₁-R₅₂-R₅₃-R₅₄-R₅₅-R₅₆-R₅₇-R₅₈-R₅₉-R₆₀-R₆₁-R₆₂-R₆₃-R₆₄-R₆₅- R₆₆-R₆₇-R₆₈-R₆₉-R₇₀-R₇₁-R₇₂

wherein R is a ribonucleotide residue and the consensus for Ala is:
[0369] R₀, R₁₈=are absent;
[0370] R₁₄, R₂₄, R₅₇, R₇₂=are independently A or absent;
[0371] R₁₅, R₂₆, R₆₄=are independently A, C, G or absent;
[0372] R₁₆, R₃₁, R₅₀=are independently N or absent;
[0373] R₁₁, R₃₂, R₃₇, R₄₁, R₄₃, R₄₅, R₄₉, R₆₅, R₆₆=are independently A, C, U or absent;
[0374] R₅, R₉, R₂₅, R₂₇, R₃₈, R₄₀, R₄₆, R₅₁, R₅₆=are independently A, G or absent;
[0375] R₇, R₂₂, R₂₉, R₄₂, R₄₄, R₅₃, R₆₃=are independently A, G, U or absent;
[0376] R₆, R₃₅=are independently A, U or absent;
[0377] R₅₅, R₆₀, R₆₁, R₇₀, R₇₁=are independently C or absent;
[0378] R₁₂, R₄₈, R₅₉=are independently C, G, U or absent;
[0379] R₁₃, R₁₇, R₂₈, R₃₀, R₃₄, R₃₉, R₅₈, R₆₂, R₆₇, R₆₈=are independently C, U or absent;
[0380] R₁, R₂, R₃, R₄, R₁₀, R₁₉, R₂₀, R₂₃, R₅₂=are independently G or absent;
[0381] R₃₃, R₃₆=are independently G, U or absent;
[0382] R₈, R₂₁, R₅₄, R₆₉=are independently U or absent;
[0383] [R₄₇]ₓ=N or absent;
[0384] wherein, e.g., x=1-271 (e.g., x=1-250, x=1-225, x=1-200, x=1-175, x=1-150, x=1-125, x=1-100, x=1-75, x=1-50, x=1-40, x=1-30, x=1-29, x=1-28, x=1-27, x=1-26, x=1-25, x=1-24, x=1-23, x=1-22, x=1-21, x=1-20, x=1-19, x=1-18, x=1-17, x=1-16, x=1-15, x=1-14, x=1-13, x=1-12, x=1-11, x=1-10, x=10-271, x=20-271, x=30-271, x=40-271, x=50-271, x=60-271, x=70-271, x=80-271, x=100-271, x=125-271, x=150-271, x=175-271, x=200-271, x=225-271, x=1, x=2, x=3, x=4, x=5, x=6, x=7, x=8, x=9, x=10, x=11, x=12, x=13, x=14, x=15, x=16, x=17, x=18, x=19, x=20, x=21, x=22, x=23, x=24, x=25, x=26, x=27, x=28, x=29, x=30, x=40, x=50, x=60, x=70, x=80, x=90, x=100, x=110, x=125, x=150, x=175, x=200, x=225, x=250, or x=271), provided that the TREM has one or both of the following properties: no more than 15% of the residues are N; or no more than 20 residues are absent.

### Arginine TREM Consensus Sequence

[0385] In an embodiment, a TREM disclosed herein comprises the sequence of Formula I ARG (SEQ ID NO: 565),

[0386] R₀-R₁-R₂-R₃-R₄-R₅-R₆-R₇-R₈-R₉-R₁₀-R₁₁-R₁₂-R₁₃-R₁₄-R₁₅-R₁₆-R₁₇-R₁₈-R₁₉-R₂₀-R₂₁-R₂₂-R₂₃-R₂₄-R₂₅-R₂₆-R₂₇-R₂₈-R₂₉-R₃₀-R₃₁-R₃₂-R₃₃-R₃₄-R₃₅-R₃₆-R₃₇-R₃₈-R₃₉-R₄₀-R₄₁-R₄₂-R₄₃- R₄₄-R₄₅-R₄₆-[R₄₇]ₓ-R₄₈-R₄₉-R₅₀-R₅₁-R₅₂-R₅₃-R₅₄-R₅₅-R₅₆-R₅₇-R₅₈-R₅₉-R₆₀-R₆₁-R₆₂-R₆₃-R₆₄-R₆₅- R₆₆-R₆₇-R₆₈-R₆₉-R₇₀-R₇₁-R₇₂

wherein R is a ribonucleotide residue and the consensus for Arg is:
[0387] R₅₇=A or absent;
[0388] R₉, R₂₇=are independently A, C, G or absent;
[0389] R₁, R₂, R₃, R₄, R₅, R₆, R₇, R₁₁, R₁₂, R₁₆, R₂₁, R₂₂, R₂₃, R₂₅, R₂₆, R₂₉, R₃₀, R₃₁, R₃₂, R₃₃, R₃₄, R₃₇, R₄₂, R₄₄, R₄₅, R₄₆, R₄₈, R₄₉, R₅₀, R₅₁, R₅₈, R₆₂, R₆₃, R₆₄, R₆₅, R₆₆, R₆₇, R₆₈, R₆₉, R₇₀, R₇₁=are independently N or absent;
[0390] R₁₃, R₁₇, R₄₁=are independently A, C, U or absent;
[0391] R₁₉, R₂₀, R₂₄, R₄₀, R₅₆=are independently A, G or absent;
[0392] R₁₄, R₁₅, R₇₂=are independently A, G, U or absent;
[0393] R₁₈=A, U or absent;
[0394] R₃₈=C or absent;
[0395] R₃₅, R₄₃, R₆₁=are independently C, G, U or absent;
[0396] R₂₈, R₅₅, R₅₉, R₆₀=are independently C, U or absent;
[0397] R₀, R₁₀, R₅₂=are independently G or absent;
[0398] R₈, R₃₉=are independently G, U or absent;
[0399] R₃₆, R₅₃, R₅₄=are independently U or absent;
[0400] [R₄₇]ₓ=N or absent;
[0401] wherein, e.g., x=1-271 (e.g., x=1-250, x=1-225, x=1-200, x=1-175, x=1-150, x=1-125, x=1-100, x=1-75, x=1-50, x=1-40, x=1-30, x=1-29, x=1-28, x=1-27, x=1-26, x=1-25, x=1-24, x=1-23, x=1-22, x=1-21, x=1-20, x=1-19, x=1-18, x=1-17, x=1-16, x=1-15, x=1-14, x=1-13, x=1-12, x=1-11, x=1-10, x=10-271, x=20-271, x=30-271, x=40-271, x=50-271, x=60-271, x=70-271, x=80-271, x=100-271, x=125-271, x=150-271, x=175-271, x=200-271, x=225-271, x=1, x=2, x=3, x=4, x=5, x=6, x=7, x=8, x=9, x=10, x=11, x=12, x=13, x=14, x=15, x=16, x=17, x=18, x=19, x=20, x=21, x=22, x=23, x=24, x=25, x=26, x=27, x=28, x=29, x=30, x=40, x=50, provided that the TREM has one or both of the following properties: no more than 15% of the residues are N; or no more than 20 residues are absent.

[0402] In an embodiment, a TREM disclosed herein comprises the sequence of Formula II ARG (SEQ ID NO: 566),
[0403] R₀-R₁-R₂-R₃-R₄-R₅-R₆-R₇-R₈-R₉-R₁₀-R₁₁-R₁₂-R₁₃-R₁₄-R₁₅-R₁₆-R₁₇-R₁₈-R₁₉-R₂₀-R₂₁-R₂₂-R₂₃-R₂₄-R₂₅-R₂₆-R₂₇-R₂₈-R₂₉-R₃₀-R₃₁-R₃₂-R₃₃-R₃₄-R₃₅-R₃₆-R₃₇-R₃₈-R₃₉-R₄₀-R₄₁-R₄₂-R₄₃- R₄₄-R₄₅-R₄₆-[R₄₇]ₓ-R₄₈-R₄₉-R₅₀-R₅₁-R₅₂-R₅₃-R₅₄-R₅₅-R₅₆-R₅₇-R₅₈-R₅₉-R₆₀-R₆₁-R₆₂-R₆₃-R₆₄-R₆₅- R₆₆-R₆₇-R₆₈-R₆₉-R₇₀-R₇₁-R₇₂
[0404] wherein R is a ribonucleotide residue and the consensus for Arg is:
[0405] R₁₈=absent;
[0406] R₂₄, R₅₇=are independently A or absent;
[0407] R₄₁=A, C or absent;
[0408] R₃, R₇, R₃₄, R₅₀=are independently A, C, G or absent;
[0409] R₂, R₅, R₆, R₁₂, R₂₆, R₃₂, R₃₇, R₄₄, R₅₈, R₆₆, R₆₇, R₆₈, R₇₀=are independently N or absent;
[0410] R₄₉, R₇₁=are independently A, C, U or absent;
[0411] R₁, R₁₅, R₁₉, R₂₅, R₂₇, R₄₀, R₄₅, R₄₆, R₅₆, R₇₂=are independently A, G or absent;
[0412] R₁₄, R₂₉, R₆₃=are independently A, G, U or absent;
[0413] R₁₆, R₂₁=are independently A, U or absent;
[0414] R₃₈, R₆₁=are independently C or absent;
[0415] R₃₃, R₄₈=are independently C, G or absent;
[0416] R₄, R₉, R₁₁, R₄₃, R₆₂, R₆₄, R₆₉=are independently C, G, U or absent;
[0417] R₁₃, R₂₂, R₂₈, R₃₀, R₃₁, R₃₅, R₅₅, R₆₀, R₆₅=are independently C, U or absent;
[0418] R₀, R₁₀, R₂₀, R₂₃, R₅₁, R₅₂=are independently G or absent;
[0419] R₈, R₃₉, R₄₂=are independently G, U or absent;
[0420] R₁₇, R₃₆, R₅₃, R₅₄, R₅₉=are independently U or absent;
[0421] [R₄₇]ₓ=N or absent;
[0422] wherein, e.g., x=1-271 (e.g., x=1-250, x=1-225, x=1-200, x=1-175, x=1-150, x=1-125, x=1-100, x=1-75, x=1-50, x=1-40, x=1-30, x=1-29, x=1-28, x=1-27, x=1-26, x=1-25, x=1-24, x=1-23, x=1-22, x=1-21, x=1-20, x=1-19, x=1-18, x=1-17, x=1-16, x=1-15, x=1-14, x=1-13, 271, x=80-271, x=100-271, x=125-271, x=150-271, x=175-271, x=200-271, x=225-271, x=1, x=2, x=3, x=4, x=5, x=6, x=7, x=8, x=9, x=10, x=11, x=12, x=13, x=14, x=15, x=16, x=17, x=18, x=19, x=20, x=21, x=22, x=23, x=24, x=25, x=26, x=27, x=28, x=29, x=30, x=40, x=50, x=60, x=70, x=80, x=90, x=100, x=110, x=125, x=150, x=175, x=200, x=225, x=250, or x=271), provided that the TREM has one or both of the following properties: no more than 15% of the residues are N; or no more than 20 residues are absent.

[0423] In an embodiment, a TREM disclosed herein comprises the sequence of Formula III ARG (SEQ ID NO: 567),
[0424] R₀-R₁-R₂-R₃-R₄-R₅-R₆-R₇-R₈-R₉-R₁₀-R₁₁-R₁₂-R₁₃-R₁₄-R₁₅-R₁₆-R₁₇-R₁₈-R₁₉-R₂₀-R₂₁-R₂₂-R₂₃-R₂₄-R₂₅-R₂₆-R₂₇-R₂₈-R₂₉-R₃₀-R₃₁-R₃₂-R₃₃-R₃₄-R₃₅-R₃₆-R₃₇-R₃₈-R₃₉-R₄₀-R₄₁-R₄₂-R₄₃- R₄₄-R₄₅-R₄₆-[R₄₇]ₓ-R₄₈-R₄₉-R₅₀-R₅₁-R₅₂-R₅₃-R₅₄-R₅₅-R₅₆-R₅₇-R₅₈-R₅₉-R₆₀-R₆₁-R₆₂-R₆₃-R₆₄-R₆₅- R₆₆-R₆₇-R₆₈-R₆₉-R₇₀-R₇₁-R₇₂
   wherein R is a ribonucleotide residue and the consensus for Arg is:
[0425] R₁₈=is absent;
[0426] R₁₅, R₂₁, R₂₄, R₄₁, R₅₇=are independently A or absent;
[0427] R₃₄, R₄₄=are independently A, C or absent;
[0428] R₃, R₅, R₅₈=are independently A, C, G or absent;
[0429] R₂, R₆, R₆₆, R₇₀=are independently N or absent;
[0430] R₃₇, R₄₉=are independently A, C, U or absent;
[0431] R₁, R₂₅, R₂₉, R₄₀, R₄₅, R₄₆, R₅₀=are independently A, G or absent;
[0432] R₁₄, R₆₃, R₆₈=are independently A, G, U or absent;
[0433] R₁₆=A, U or absent;
[0434] R₃₈, R₆₁=are independently C or absent;
[0435] R₇, R₁₁, R₁₂, R₂₆, R₄₈=are independently C, G or absent;
[0436] R₆₄, R₆₇, R₆₉=are independently C, G, U or absent;
[0437] R₄, R₁₃, R₂₂, R₂₈, R₃₀, R₃₁, R₃₅, R₄₃, R₅₅, R₆₀, R₆₂, R₆₅, R₇₁=are independently C, U or absent;
[0438] R₀, R₁₀, R₁₉, R₂₀, R₂₃, R₂₇, R₃₃, R₅₁, R₅₂, R₅₆, R₇₂=are independently G or absent;
[0439] R₈, R₉, R₃₂, R₃₉, R₄₂=are independently G, U or absent;
[0440] R₁₇, R₃₆, R₅₃, R₅₄, R₅₉=are independently U or absent;
[0441] [R₄₇]ₓ=N or absent;
[0442] wherein, e.g., x=1-271 (e.g., x=1-250, x=1-225, x=1-200, x=1-175, x=1-150, x=1-125, x=1-100, x=1-75, x=1-50, x=1-40, x=1-30, x=1-29, x=1-28, x=1-27, x=1-26, x=1-25, x=1-24, x=1-23, x=1-22, x=1-21, x=1-20, x=1-19, x=1-18, x=1-17, x=1-16, x=1-15, x=1-14, x=1-13, x=1-12, x=1-11, x=1-10, x=10-271, x=20-271, x=30-271, x=40-271, x=50-271, x=60-271, x=70-271, x=80-271, x=100-271, x=125-271, x=150-271, x=175-271, x=200-271, x=225-271, x=1, x=2, x=3, x=4, x=5, x=6, x=7, x=8, x=9, x=10, x=11, x=12, x=13, x=14, x=15, x=16, x=17, x=18, x=19, x=20, x=21, x=22, x=23, x=24, x=25, x=26, x=27, x=28, x=29, x=30, x=40, x=50, x=60, x=70, x=80, x=90, x=100, x=110, x=125, x=150, x=175, x=200, x=225, x=250, or x=271), provided that the TREM has one or both of the following properties: no more than 15% of the residues are N; or no more than 20 residues are absent.

### Asparagine TREM Consensus Sequence

[0443] In an embodiment, a TREM disclosed herein comprises the sequence of Formula I ASN (SEQ ID NO: 568),
[0444] R₀-R₁-R₂-R₃-R₄-R₅-R₆-R₇-R₈-R₉-R₁₀-R₁₁-R₁₂-R₁₃-R₁₄-R₁₅-R₁₆-R₁₇-R₁₈-R₁₉-R₂₀-R₂₁-R₂₂-R₂₃-R₂₄-R₂₅-R₂₆-R₂₇-R₂₈-R₂₉-R₃₀-R₃₁-R₃₂-R₃₃-R₃₄-R₃₅-R₃₆-R₃₇-R₃₈-R₃₉-R₄₀-R₄₁-R₄₂-R₄₃- R₄₄-R₄₅-R₄₆-[R₄₇]ₓ-R₄₈-R₄₉-R₅₀-R₅₁-R₅₂-R₅₃-R₅₄-R₅₅-R₅₆-R₅₇-R₅₈-R₅₉-R₆₀-R₆₁-R₆₂-R₆₃-R₆₄-R₆₅- R₆₆-R₆₇-R₆₈-R₆₉-R₇₀-R₇₁-R₇₂
   wherein R is a ribonucleotide residue and the consensus for Asn is:
[0445] R₀, R₁₈=are absent;
[0446] R₄₁=A or absent;
[0447] R₁₄, R₄₈, R₅₆=are independently A, C, G or absent;
[0448] R₂, R₄, R₅, R₆, R₁₂, R₁₇, R₂₆, R₂₉, R₃₀, R₃₁, R₄₄, R₄₅, R₄₆, R₄₉, R₅₀, R₅₈, R₆₂, R₆₃, R₆₅, R₆₆, R₆₇, R₆₈, R₇₀, R₇₁=are independently N or absent;
[0449] R₁₁, R₁₃, R₂₂, R₄₂, R₅₅, R₅₉=are independently A, C, U or absent;
[0450] R₉, R₁₅, R₂₄, R₂₇, R₃₄, R₃₇, R₅₁, R₇₂=are independently A, G or absent;
[0451] R₁, R₇, R₂₅, R₆₉=are independently A, G, U or absent;
[0452] R₄₀, R₅₇=are independently A, U or absent;
[0453] R₆₀=C or absent;
[0454] R₃₃=C, G or absent;
[0455] R₂₁, R₃₂, R₄₃, R₆₄=are independently C, G, U or absent;
[0456] R₃, R₁₆, R₂₈, R₃₅, R₃₆, R₆₁=are independently C, U or absent;
[0457] R₁₀, R₁₉, R₂₀, R₅₂=are independently G or absent;
[0458] R₅₄=G, U or absent;
[0459] R₈, R₂₃, R₃₈, R₃₉, R₅₃=are independently U or absent;
[0460] [R₄₇]ₓ=N or absent;
[0461] wherein, e.g., x=1-271 (e.g., x=1-250, x=1-225, x=1-200, x=1-175, x=1-150, x=1-125, x=1-100, x=1-75, x=1-50, x=1-40, x=1-30, x=1-29, x=1-28, x=1-27, x=1-26, x=1-25, x=1-24, x=1-23, x=1-22, x=1-21, x=1-20, x=1-19, x=1-18, x=1-17, x=1-16, x=1-15, x=1-14, x=1-13, x=1-12, x=1-11, x=1-10, x=10-271, x=20-271, x=30-271, x=40-271, x=50-271, x=60-271, x=70-271, x=80-271, x=100-271, x=125-271, x=150-271, x=175-271, x=200-271, x=225-271, x=1, x=2, x=3, x=4, x=5, x=6, x=7, x=8, x=9, x=10, x=11, x=12, x=13, x=14, x=15, x=16, x=17, x=18, x=19, x=20, x=21, x=22, x=23, x=24, x=25, x=26, x=27, x=28, x=29, x=30, x=40, x=50, x=60, x=70, x=80, x=90, x=100, x=110, x=125, x=150, x=175, x=200, x=225, x=250, or x=271), provided that the TREM has one or both of the following properties: no more than 15% of the residues are N; or no more than 20 residues are absent.

[0462] In an embodiment, a TREM disclosed herein comprises the sequence of Formula II ASN (SEQ ID NO: 569),
[0463] R₀-R₁-R₂-R₃-R₄-R₅-R₆-R₇-R₈-R₉-R₁₀-R₁₁-R₁₂-R₁₃-R₁₄-R₁₅-R₁₆-R₁₇-R₁₈-R₁₉-R₂₀-R₂₁-R₂₂-R₂₃-R₂₄-R₂₅-R₂₆-R₂₇-R₂₈-R₂₉-R₃₀-R₃₁-R₃₂-R₃₃-R₃₄-R₃₅-R₃₆-R₃₇-R₃₈-R₃₉-R₄₀-R₄₁-R₄₂-R₄₃- R₄₄-R₄₅-R₄₆-[R₄₇]ₓ-R₄₈-R₄₉-R₅₀-R₅₁-R₅₂-R₅₃-R₅₄-R₅₅-R₅₆-R₅₇-R₅₈-R₅₉-R₆₀-R₆₁-R₆₂-R₆₃-R₆₄-R₆₅- R₆₆-R₆₇-R₆₈-R₆₉-R₇₀-R₇₁-R₇₂
   wherein R is a ribonucleotide residue and the consensus for Asn is:
[0464] R₀, R₁₈=are absent
[0465] R₂₄, R₄₁, R₄₆, R₆₂=are independently A or absent;
[0466] R₅₉=A, C or absent;
[0467] R₁₄, R₅₆, R₆₆=are independently A, C, G or absent;
[0468] R₁₇, R₂₉=are independently N or absent;
[0469] R₁₁, R₂₆, R₄₂, R₅₅=are independently A, C, U or absent;
[0470] R₁, R₉, R₁₂, R₁₅, R₂₅, R₃₄, R₃₇, R₄₈, R₅₁, R₆₇, R₆₈, R₆₉, R₇₀, R₇₂=are independently A, G or absent;
[0471] R₄₄, R₄₅, R₅₈=are independently A, G, U or absent;
[0472] R₄₀, R₅₇=are independently A, U or absent;
[0473] R₅, R₂₈, R₆₀=are independently C or absent;
[0474] R₃₃, R₆₅=are independently C, G or absent;
[0475] R₂₁, R₄₃, R₇₁=are independently C, G, U or absent;
[0476] R₃, R₆, R₁₃, R₂₂, R₃₂, R₃₅, R₃₆, R₆₁, R₆₃, R₆₄=are independently C, U or absent;
[0477] R₇, R₁₀, R₁₉, R₂₀, R₂₇, R₄₉, R₅₂=are independently G or absent;
[0478] R₅₄=G, U or absent;
[0479] R₂, R₄, R₈, R₁₆, R₂₃, R₃₀, R₃₁, R₃₈, R₃₉, R₅₀, R₅₃=are independently U or absent;
[0480] [R₄₇]ₓ=N or absent;
[0481] wherein, e.g., x=1-271 (e.g., x=1-250, x=1-225, x=1-200, x=1-175, x=1-150, x=1-125, x=1-100, x=1-75, x=1-50, x=1-40, x=1-30, x=1-29, x=1-28, x=1-27, x=1-26, x=1-25, x=1-24, x=1-23, x=1-22, x=1-21, x=1-20, x=1-19, x=1-18, x=1-17, x=1-16, x=1-15, x=1-14, x=1-13, x=1-12, x=1-11, x=1-10, x=10-271, x=20-271, x=30-271, x=40-271, x=50-271, x=60-271, x=70-271, x=80-271, x=100-271, x=125-271, x=150-271, x=175-271, x=200-271, x=225-271, x=1, x=2, x=3, x=4, x=5, x=6, x=7, x=8, x=9, x=10, x=11, x=12, x=13, x=14, x=15, x=16, x=17, x=18, x=19, x=20, x=21, x=22, x=23, x=24, x=25, x=26, x=27, x=28, x=29, x=30, x=40, x=50, x=60, x=70, x=80, x=90, x=100, x=110, x=125, x=150, x=175, x=200, x=225, x=250, or x=271), provided that the TREM has one or both of the following properties: no more than 15% of the residues are N; or no more than 20 residues are absent.

[0482] In an embodiment, a TREM disclosed herein comprises the sequence of Formula III ASN (SEQ ID NO: 570),
[0483] R₀-R₁-R₂-R₃-R₄-R₅-R₆-R₇-R₈-R₉-R₁₀-R₁₁-R₁₂-R₁₃-R₁₄-R₁₅-R₁₆-R₁₇-R₁₈-R₁₉-R₂₀-R₂₁-R₂₂-R₂₃-R₂₄-R₂₅-R₂₆-R₂₇-R₂₈-R₂₉-R₃₀-R₃₁-R₃₂-R₃₃-R₃₄-R₃₅-R₃₆-R₃₇-R₃₈-R₃₉-R₄₀-R₄₁-R₄₂-R₄₃- R₄₄-R₄₅-R₄₆-[R₄₇]ₓ-R₄₈-R₄₉-R₅₀-R₅₁-R₅₂-R₅₃-R₅₄-R₅₅-R₅₆-R₅₇-R₅₈-R₅₉-R₆₀-R₆₁-R₆₂-R₆₃-R₆₄-R₆₅- R₆₆-R₆₇-R₆₈-R₆₉-R₇₀-R₇₁-R₇₂ wherein R is a ribonucleotide residue and the consensus for Asn is:
[0484] R₀, R₁₈=are absent
[0485] R₂₄, R₄₀, R₄₁, R₄₆, R₆₂=are independently A or absent;
[0486] R₅₉=A, C or absent;
[0487] R₁₄, R₅₆, R₆₆=are independently A, C, G or absent;
[0488] R₁₁, R₂₆, R₄₂, R₅₅=are independently A, C, U or absent;
[0489] R₁, R₉, R₁₂, R₁₅, R₃₄, R₃₇, R₄₈, R₅₁, R₆₇, R₆₈, R₆₉, R₇₀=are independently A, G or absent;
[0490] R₄₄, R₄₅, R₅₈=are independently A, G, U or absent;
[0491] R₅₇=A, U or absent;
[0492] R₅, R₂₈, R₆₀=are independently C or absent;
[0493] R₃₃, R₆₅=are independently C, G or absent;
[0494] R₁₇, R₂₁, R₂₉=are independently C, G, U or absent;
[0495] R₃, R₆, R₁₃, R₂₂, R₃₂, R₃₅, R₃₆, R₄₃, R₆₁, R₆₃, R₆₄, R₇₁=are independently C, U or absent;
[0496] R₇, R₁₀, R₁₉, R₂₀, R₂₅, R₂₇, R₄₉, R₅₂, R₇₂=are independently G or absent;
[0497] R₅₄=G, U or absent;
[0498] R₂, R₄, R₈, R₁₆, R₂₃, R₃₀, R₃₁, R₃₈, R₃₉, R₅₀, R₅₃=are independently U or absent;
[0499] [R₄₇]ₓ=N or absent;
[0500] wherein, e.g., x=1-271 (e.g., x=1-250, x=1-225, x=1-200, x=1-175, x=1-150, x=1-125, x=1-100, x=1-75, x=1-50, x=1-40, x=1-30, x=1-29, x=1-28, x=1-27, x=1-26, x=1-25, x=1-24, x=1-23, x=1-22, x=1-21, x=1-20, x=1-19, x=1-18, x=1-17, x=1-16, x=1-15, x=1-14, x=1-13, x=1-12, x=1-11, x=1-10, x=10-271, x=20-271, x=30-271, x=40-271, x=50-271, x=60-271, x=70-271, x=80-271, x=100-271, x=125-271, x=150-271, x=175-271, x=200-271, x=225-271, x=1, x=2, x=3, x=4, x=5, x=6, x=7, x=8, x=9, x=10, x=11, x=12, x=13, x=14, x=15, x=16, x=17, x=18, x=19, x=20, x=21, x=22, x=23, x=24, x=25, x=26, x=27, x=28, x=29, x=30, x=40, x=50, x=60, x=70, x=80, x=90, x=100, x=110, x=125, x=150, x=175, x=200, x=225, x=250, or x=271), provided that the TREM has one or both of the following properties: no more than 15% of the residues are N; or no more than 20 residues are absent.

### Aspartate TREM Consensus Sequence

[0501] In an embodiment, a TREM disclosed herein comprises the sequence of Formula I ASP (SEQ ID NO: 571),
[0502] R₀-R₁-R₂-R₃-R₄-R₅-R₆-R₇-R₈-R₉-R₁₀-R₁₁-R₁₂-R₁₃-R₁₄-R₁₅-R₁₆-R₁₇-R₁₈-R₁₉-R₂₀-R₂₁-R₂₂-R₂₃-R₂₄-R₂₅-R₂₆-R₂₇-R₂₈-R₂₉-R₃₀-R₃₁-R₃₂-R₃₃-R₃₄-R₃₅-R₃₆-R₃₇-R₃₈-R₃₉-R₄₀-R₄₁-R₄₂-R₄₃- R₄₄-R₄₅-R₄₆-[R₄₇]ₓ-R₄₈-R₄₉-R₅₀-R₅₁-R₅₂-R₅₃-R₅₄-R₅₅-R₅₆-R₅₇-R₅₈-R₅₉-R₆₀-R₆₁-R₆₂-R₆₃-R₆₄-R₆₅- R₆₆-R₆₇-R₆₈-R₆₉-R₇₀-R₇₁-R₇₂
   wherein R is a ribonucleotide residue and the consensus for Asp is:
[0503] R₀=absent
[0504] R₂₄, R₇₁=are independently A, C or absent;
[0505] R₃₃, R₄₆=are independently A, C, G or absent;
[0506] R₂, R₃, R₄, R₅, R₆, R₁₂, R₁₆, R₂₂, R₂₆, R₂₉, R₃₁, R₃₂, R₄₄, R₄₈, R₄₉, R₅₈, R₆₃, R₆₄, R₆₆, R₆₇, R₆₈, R₆₉=are independently N or absent;
[0507] R₁₃, R₂₁, R₃₄, R₄₁, R₅₇, R₆₅=are independently A, C, U or absent;
[0508] R₀, R₁₀, R₁₄, R₁₅, R₂₀, R₂₇, R₃₇, R₄₀, R₅₁, R₅₆, R₇₂=are independently A, G or absent;
[0509] R₇, R₂₅, R₄₂=are independently A, G, U or absent;
[0510] R₃₉=C or absent;
[0511] R₅₀, R₆₂=are independently C, G or absent;
[0512] R₃₀, R₄₃, R₄₅, R₅₅, R₇₀=are independently C, G, U or absent;
[0513] R₈, R₁₁, R₁₇, R₁₈, R₂₈, R₃₅, R₅₃, R₅₉, R₆₀, R₆₁=are independently C, U or absent;
[0514] R₁₉, R₅₂=are independently G or absent;
[0515] R₁=G, U or absent;
[0516] R₂₃, R₃₆, R₃₈, R₅₄=are independently U or absent;
[0517] [R₄₇]ₓ=N or absent;
[0518] wherein, e.g., x=1-271 (e.g., x=1-250, x=1-225, x=1-200, x=1-175, x=1-150, x=1-125, x=1-100, x=1-75, x=1-50, x=1-40, x=1-30, x=1-29, x=1-28, x=1-27, x=1-26, x=1-25, x=1-24, x=1-23, x=1-22, x=1-21, x=1-20, x=1-19, x=1-18, x=1-17, x=1-16, x=1-15, x=1-14, x=1-13, x=1-12, x=1-11, x=1-10, x=10-271, x=20-271, x=30-271, x=40-271, x=50-271, x=60-271, x=70-271, x=80-271, x=100-271, x=125-271, x=150-271, x=175-271, x=200-271, x=225-271, x=1, x=2, x=3, x=4, x=5, x=6, x=7, x=8, x=9, x=10, x=11, x=12, x=13, x=14, x=15, x=16, x=17, x=18, x=19, x=20, x=21, x=22, x=23, x=24, x=25, x=26, x=27, x=28, x=29, x=30, x=40, x=50, x=60, x=70, x=80, x=90, x=100, x=110, x=125, x=150, x=175, x=200, x=225, x=250, or x=271), provided that the TREM has one or both of the following properties: no more than 15% of the residues arc N; or no more than 20 residues arc absent.

[0519] In an embodiment, a TREM disclosed herein comprises the sequence of Formula II ASP (SEQ ID NO: 572),
[0520] R₀-R₁-R₂-R₃-R₄-R₅-R₆-R₇-R₈-R₉-R₁₀-R₁₁-R₁₂-R₁₃-R₁₄-R₁₅-R₁₆-R₁₇-R₁₈-R₁₉-R₂₀-R₂₁-R₂₂-R₂₃-R₂₄-R₂₅-R₂₆-R₂₇-R₂₈-R₂₉-R₃₀-R₃₁-R₃₂-R₃₃-R₃₄-R₃₅-R₃₆-R₃₇-R₃₈-R₃₉-R₄₀-R₄₁-R₄₂-R₄₃- R₄₄-R₄₅-R₄₆-[R₄₇]ₓ-R₄₈-R₄₉-R₅₀-R₅₁-R₅₂-R₅₃-R₅₄-R₅₅-R₅₆-R₅₇-R₅₈-R₅₉-R₆₀-R₆₁-R₆₂-R₆₃-R₆₄-R₆₅- R₆₆-R₆₇-R₆₈-R₆₉-R₇₀-R₇₁-R₇₂
   wherein R is a ribonucleotide residue and the consensus for Asp is:
[0521] R₀, R₁₇, R₁₈, R₂₃=are independently absent;
[0522] R₀, R₄₀=are independently A or absent;
[0523] R₂₄, R₇₁=are independently A, C or absent;
[0524] R₆₇, R₆₈=are independently A, C, G or absent;
[0525] R₂, R₆, R₆₆=are independently N or absent;
[0526] R₆₇, R₆₃=are independently A, C, U or absent;
[0527] R₁₀, R₁₄, R₂₇, R₃₃, R₃₇, R₄₄, R₄₆, R₅₁, R₅₆, R₆₄, R₇₂=are independently A, G or absent;
[0528] R₇, R₁₂, R₂₆, R₆₅=are independently A, U or absent;
[0529] R₃₉, R₆₁, R₆₂=are independently C or absent;
[0530] R₃, R₃₁, R₄₅, R₇₀=are independently C, G or absent;
[0531] R₄, R₅, R₂₉, R₄₃, R₅₅=are independently C, G, U or absent;
[0532] R₈, R₁₁, R₁₃, R₃₀, R₃₂, R₃₄, R₃₅, R₄₁, R₄₈, R₅₃, R₅₉, R₆₀=are independently C, U or absent;
[0533] R₁₅, R₁₉, R₂₀, R₂₅, R₄₂, R₅₀, R₅₂=are independently G or absent;
[0534] R₁, R₂₂, R₄₉, R₅₈, R₆₉=are independently G, U or absent;
[0535] R₁₆, R₂₁, R₂₈, R₃₆, R₃₈, R₅₄=are independently U or absent;
[0536] [R₄₇]ₓ=N or absent;
[0537] wherein, e.g., x=1-271 (e.g., x=1-250, x=1-225, x=1-200, x=1-175, x=1-150, x=1-125, x=1-100, x=1-75, x=1-50, x=1-40, x=1-30, x=1-29, x=1-28, x=1-27, x=1-26, x=1-25, x=1-24, x=1-23, x=1-22, x=1-21, x=1-20, x=1-19, x=1-18, x=1-17, x=1-16, x=1-15, x=1-14, x=1-13, x=1-12, x=1-11, x=1-10, x=10-271, x=20-271, x=30-271, x=40-271, x=50-271, x=60-271, x=70-271, x=80-271, x=100-271, x=125-271, x=150-271, x=175-271, x=200-271, x=225-271, x=1, x=2, x=3, x=4, x=5, x=6, x=7, x=8, x=9, x=10, x=11, x=12, x=13, x=14, x=15, x=16, x=17, x=18, x=19, x=20, x=21, x=22, x=23, x=24, x=25, x=26, x=27, x=28, x=29, x=30, x=40, x=50, x=60, x=70, x=80, x=90, x=100, x=110, x=125, x=150, x=175, x=200, x=225, x=250, or x=271), provided that the TREM has one or both of the following properties: no more than 15% of the residues are N; or no more than 20 residues are absent.

[0538] In an embodiment, a TREM disclosed herein comprises the sequence of Formula III ASP (SEQ ID NO: 573),
[0539] R₀-R₁-R₂-R₃-R₄-R₅-R₆-R₇-R₈-R₉-R₁₀-R₁₁-R₁₂-R₁₃-R₁₄-R₁₅-R₁₆-R₁₇-R₁₈-R₁₉-R₂₀-R₂₁-R₂₂-R₂₃-R₂₄-R₂₅-R₂₆-R₂₇-R₂₈-R₂₉-R₃₀-R₃₁-R₃₂-R₃₃-R₃₄-R₃₅-R₃₆-R₃₇-R₃₈-R₃₉-R₄₀-R₄₁-R₄₂-R₄₃- R₄₄-R₄₅-R₄₆-[R₄₇]ₓ-R₄₈-R₄₉-R₅₀-R₅₁-R₅₂-R₅₃-R₅₄-R₅₅-R₅₆-R₅₇-R₅₈-R₅₉-R₆₀-R₆₁-R₆₂-R₆₃-R₆₄-R₆₅- R₆₆-R₆₇-R₆₈-R₆₉-R₇₀-R₇₁-R₇₂
   wherein R is a ribonucleotide residue and the consensus for Asp is:
[0540] R₀, R₁₇, R₁₈, R₂₃=are absent
[0541] R₉, R₁₂, R₄₀, R₆₅, R₇₁=are independently A or absent;
[0542] R₂, R₂₄, R₅₇=are independently A, C or absent;
[0543] R₆, R₁₄, R₂₇, R₄₆, R₅₁, R₅₆, R₆₄, R₆₇, R₆₈=are independently A, G or absent;
[0544] R₃, R₃₁, R₃₅, R₃₉, R₆₁, R₆₂=are independently C or absent;
[0545] R₆₆=C, G or absent;
[0546] R₅, R₈, R₂₉, R₃₀, R₃₂, R₃₄, R₄₁, R₄₃, R₄₈, R₅₅, R₅₉, R₆₀, R₆₃=are independently C, U or absent;
[0547] R₁₀, R₁₅, R₁₉, R₂₀, R₂₅, R₃₃, R₃₇, R₄₂, R₄₄, R₄₅, R₄₉, R₅₀, R₅₂, R₆₉, R₇₀, R₇₂=are independently G or absent;
[0548] R₂₂, R₅₈=are independently G, U or absent;
[0549] R₁, R₄, R₇, R₁₁, R₁₃, R₁₆, R₂₁, R₂₆, R₂₈, R₃₆, R₃₈, R₅₃, R₅₄=are independently U or absent;
[0550] [R₄₇]ₓ=N or absent;
[0551] wherein, e.g., x=1-271 (e.g., x=1-250, x=1-225, x=1-200, x=1-175, x=1-150, x=1-125, x=1-100, x=1-75, x=1-50, x=1-40, x=1-30, x=1-29, x=1-28, x=1-27, x=1-26, x=1-25, x=1-24, x=1-23, x=1-22, x=1-21, x=1-20, x=1-19, x=1-18, x=1-17, x=1-16, x=1-15, x=1-14, x=1-13, x=1-12, x=1-11, x=1-10, x=10-271, x=20-271, x=30-271, x=40-271, x=50-271, x=60-271, x=70-271, x=80-271, x=100-271, x=125-271, x=150-271, x=175-271, x=200-271, x=225-271, x=1, x=2, x=3, x=4, x=5, x=6, x=7, x=8, x=9, x=10, x=11, x=12, x=13, x=14, x=15, x=16, x=17, x=18, x=19, x=20, x=21, x=22, x=23, x=24, x=25, x=26, x=27, x=28, x=29, x=30, x=40, x=50, x=60, x=70, x=80, x=90, x=100, x=110, x=125, x=150, x=175, x=200, x=225, x=250, or x=271), provided that the TREM has one or both of the following properties: no more than 15% of the residues are N; or no more than 20 residues are absent.

### Cysteine TREM Consensus Sequence

[0552] In an embodiment, a TREM disclosed herein comprises the sequence of Formula I _{CYS} (SEQ ID NO: 574),
[0553] R₀-R₁-R₂-R₃-R₄-R₅-R₆-R₇-R₈-R₉-R₁₀-R₁₁-R₁₂-R₁₃-R₁₄-R₁₅-R₁₆-R₁₇-R₁₈-R₁₉-R₂₀-R₂₁-R₂₂-R₂₃-R₂₄-R₂₅-R₂₆-R₂₇-R₂₈-R₂₉-R₃₀-R₃₁-R₃₂-R₃₃-R₃₄-R₃₅-R₃₆-R₃₇-R₃₈-R₃₉-R₄₀-R₄₁-R₄₂-R₄₃- R₄₄-R₄₅-R₄₆-[R₄₇]ₓ-R₄₈-R₄₉-R₅₀-R₅₁-R₅₂-R₅₃-R₅₄-R₅₅-R₅₆-R₅₇-R₅₈-R₅₉-R₆₀-R₆₁-R₆₂-R₆₃-R₆₄-R₆₅- R₆₆-R₆₇-R₆₈-R₆₉-R₇₀-R₇₁-R₇₂
   wherein R is a ribonucleotide residue and the consensus for Cys is:
[0554] R₀=absent
[0555] R₁₄, R₃₉, R₅₇=are independently A or absent;
[0556] R₄₁=A, C or absent;
[0557] R₁₀, R₁₅, R₂₇, R₃₃, R₆₂=are independently A, C, G or absent;
[0558] R₃, R₄, R₅, R₆, R₁₂, R₁₃, R₁₆, R₂₄, R₂₆, R₂₉, R₃₀, R₃₁, R₃₂, R₃₄, R₄₂, R₄₄, R₄₅, R₄₆, R₄₈, R₄₉,R 58, R₆₃, R₆₄, R₆₆, R₆₇, R₆₈, R₆₉, R₇₀=are independently N or absent;
[0559] R₆₅=A, C, U or absent;
[0560] R₀, R₂₅, R₃₇, R₄₀, R₅₂, R₅₆=are independently A, G or absent;
[0561] R₇, R₂₀, R₅₁=are independently A, G, U or absent;
[0562] R₁₈, R₃₈, R₅₅=are independently C or absent;
[0563] R₂=C, G or absent;
[0564] R₂₁, R₂₈, R₄₃, R₅₀=are independently C, G, U or absent;
[0565] R₁₁, R₂₂, R₂₃, R₃₅, R₃₆, R₅₉, R₆₀, R₆₁, R₇₁, R₇₂=are independently C, U or absent;
[0566] R₁, R₁₉=are independently G or absent;
[0567] R₁₇=G, U or absent;
[0568] R₈, R₅₃, R₅₄=are independently U or absent;
[0569] [R₄₇]ₓ=N or absent;
[0570] wherein, e.g., x=1-271 (e.g., x=1-250, x=1-225, x=1-200, x=1-175, x=1-150, x=1-125, x=1-100, x=1-75, x=1-50, x=1-40, x=1-30, x=1-29, x=1-28, x=1-27, x=1-26, x=1-25, x=1-24, x=1-23, x=1-22, x=1-21, x=1-20, x=1-19, x=1-18, x=1-17, x=1-16, x=1-15, x=1-14, x=1-13, x=1-12, x=1-11, x=1-10, x=10-271, x=20-271, x=30-271, x=40-271, x=50-271, x=60-271, x=70-271, x=80-271, x=100-271, x=125-271, x=150-271, x=175-271, x=200-271, x=225-271, x=1, x=2, x=3, x=4, x=5, x=6, x=7, x=8, x=9, x=10, x=11, x=12, x=13, x=14, x=15, x=16, x=17, x=18, x=19, x=20, x=21, x=22, x=23, x=24, x=25, x=26, x=27, x=28, x=29, x=30, x=40, x=50, x=60, x=70, x=80, x=90, x=100, x=110, x=125, x=150, x=175, x=200, x=225, x=250, or x=271), provided that the TREM has one or both of the following properties: no more than 15% of the residues are N; or no more than 20 residues are absent.

[0571] In an embodiment, a TREM disclosed herein comprises the sequence of Formula II CYS (SEQ ID NO: 575),
[0572] R₀-R₁-R₂-R₃-R₄-R₅-R₆-R₇-R₈-R₉-R₁₀-R₁₁-R₁₂-R₁₃-R₁₄-R₁₅-R₁₆-R₁₇-R₁₈-R₁₉-R₂₀-R₂₁-R₂₂-R₂₃-R₂₄-R₂₅-R₂₆-R₂₇-R₂₈-R₂₉-R₃₀-R₃₁-R₃₂-R₃₃-R₃₄-R₃₅-R₃₆-R₃₇-R₃₈-R₃₉-R₄₀-R₄₁-R₄₂-R₄₃- R₄₄-R₄₅-R₄₆-[R₄₇]ₓ-R₄₈-R₄₉-R₅₀-R₅₁-R₅₂-R₅₃-R₅₄-R₅₅-R₅₆-R₅₇-R₅₈-R₅₉-R₆₀-R₆₁-R₆₂-R₆₃-R₆₄-R₆₅- R₆₆-R₆₇-R₆₈-R₆₉-R₇₀-R₇₁-R₇₂ wherein R is a ribonucleotide residue and the consensus for Cys is:
[0573] R₀, R₁₈, R₂₃=are absent;
[0574] R₁₄, R₂₄, R₂₆, R₂₉, R₃₉, R₄₁, R₄₅, R₅₇=are independently A or absent;
[0575] R₄₄=A, C or absent;
[0576] R₂₇, R₆₂=are independently A, C, G or absent;
[0577] R₁₆=A, C, G, U or absent;
[0578] R₃₀, R₇₀=are independently A, C, U or absent;
[0579] R₅, R₇, R₉, R₂₅, R₃₄, R₃₇, R₄₀, R₄₆, R₅₂, R₅₆, R₅₈, R₆₆=are independently A, G or absent;
[0580] R₂₀, R₅₁=are independently A, G, U or absent;
[0581] R₃₅, R₃₈, R₄₃, R₅₅, R₆₉=are independently C or absent;
[0582] R₂, R₄, R₁₅=are independently C, G or absent;
[0583] R₁₃=C, G, U or absent;
[0584] R₆, R₁₁, R₂₈, R₃₆, R₄₈, R₄₉, R₅₀, R₆₀, R₆₁, R₆₇, R₆₈, R₇₁, R₇₂=are independently C, U or absent;
[0585] R₁, R₃, R₁₀, R₁₉, R₃₃, R₆₃=are independently G or absent;
[0586] R₈, R₁₇, R₂₁, R₆₄=are independently G, U or absent;
[0587] R₁₂, R₂₂, R₃₁, R₃₂, R₄₂, R₅₃, R₅₄, R₆₅=are independently U or absent;
[0588] R₅₉=U, or absent;
[0589] [R₄₇]ₓ=N or absent;
[0590] wherein, e.g., x=1-271 (e.g., x=1-250, x=1-225, x=1-200, x=1-175, x=1-150, x=1-125, x=1-100, x=1-75, x=1-50, x=1-40, x=1-30, x=1-29, x=1-28, x=1-27, x=1-26, x=1-25, x=1-24, x=1-23, x=1-22, x=1-21, x=1-20, x=1-19, x=1-18, x=1-17, x=1-16, x=1-15, x=1-14, x=1-13, x=1-12, x=1-11, x=1-10, x=10-271, x=20-271, x=30-271, x=40-271, x=50-271, x=60-271, x=70-271, x=80-271, x=100-271, x=125-271, x=150-271, x=175-271, x=200-271, x=225-271, x=1, x=2, x=3, x=4, x=5, x=6, x=7, x=8, x=9, x=10, x=11, x=12, x=13, x=14, x=15, x=16, x=17, x=18, x=19, x=20, x=21, x=22, x=23, x=24, x=25, x=26, x=27, x=28, x=29, x=30, x=40, x=50, x=60, x=70, x=80, x=90, x=100, x=110, x=125, x=150, x=175, x=200, x=225, x=250, or x=271), provided that the TREM has one or both of the following properties: no more than 15% of the residues are N; or no more than 20 residues are absent.

[0591] In an embodiment, a TREM disclosed herein comprises the sequence of Formula III CYS (SEQ ID NO: 576),
[0592] R₀-R₁-R₂-R₃-R₄-R₅-R₆-R₇-R₈-R₉-R₁₀-R₁₁-R₁₂-R₁₃-R₁₄-R₁₅-R₁₆-R₁₇-R₁₈-R₁₉-R₂₀-R₂₁-R₂₂-R₂₃-R₂₄-R₂₅-R₂₆-R₂₇-R₂₈-R₂₉-R₃₀-R₃₁-R₃₂-R₃₃-R₃₄-R₃₅-R₃₆-R₃₇-R₃₈-R₃₉-R₄₀-R₄₁-R₄₂-R₄₃- R₄₄-R₄₅-R₄₆-[R₄₇]ₓ-R₄₈-R₄₉-R₅₀-R₅₁-R₅₂-R₅₃-R₅₄-R₅₅-R₅₆-R₅₇-R₅₈-R₅₉-R₆₀-R₆₁-R₆₂-R₆₃-R₆₄-R₆₅- R₆₆-R₆₇-R₆₈-R₆₉-R₇₀-R₇₁-R₇₂
   wherein R is a ribonucleotide residue and the consensus for Cys is:
[0593] R₀, R₁₈, R₂₃=are absent
[0594] R₁₄, R₂₄, R₂₆, R₂₉, R₃₄, R₃₉, R₄₁, R₄₅, R₅₇, R₅₈=are independently A or absent;
[0595] R₄₄, R₇₀=are independently A, C or absent;
[0596] R₆₂=A, C, G or absent;
[0597] R₁₆=N or absent;
[0598] R₅, R₇, R₉, R₂₀, R₄₀, R₄₆, R₅₁, R₅₂, R₅₆, R₆₆=are independently A, G or absent;
[0599] R₂₈, R₃₅, R₃₈, R₄₃, R₅₅, R₆₇, R₆₉=are independently C or absent;
[0600] R₄, R₁₅=are independently C, G or absent;
[0601] R₆, R₁₁, R₁₃, R₃₀, R₄₈, R₄₉, R₅₀, R₆₀, R₆₁, R₆₈, R₇₁, R₇₂=are independently C, U or absent;
[0602] R₁, R₂, R₃, R₁₀, R₁₉, R₂₅, R₂₇, R₃₃, R₃₇, R₆₃=are independently G or absent;
[0603] R₈, R₂₁, R₆₄=are independently G, U or absent;
[0604] R₁₂, R₁₇, R₂₂, R₃₁, R₃₂, R₃₆, R₄₂, R₅₃, R₅₄, R₅₉, R₆₅=are independently U or absent;
[0605] [R₄₇]ₓ=N or absent;
[0606] wherein, e.g., x=1-271 (e.g., x=1-250, x=1-225, x=1-200, x=1-175, x=1-150, x=1-125, x=1-100, x=1-75, x=1-50, x=1-40, x=1-30, x=1-29, x=1-28, x=1-27, x=1-26, x=1-25, x=1-24, x=1-23, x=1-22, x=1-21, x=1-20, x=1-19, x=1-18, x=1-17, x=1-16, x=1-15, x=1-14, x=1-13, x=1-12, x=1-11, x=1-10, x=10-271, x=20-271, x=30-271, x=40-271, x=50-271, x=60-271, x=70-271, x=80-271, x=100-271, x=125-271, x=150-271, x=175-271, x=200-271, x=225-271, x=1, x=2, x=3, x=4, x=5, x=6, x=7, x=8, x=9, x=10, x=11, x=12, x=13, x=14, x=15, x=16, x=17, x=18, x=19, x=20, x=21, x=22, x=23, x=24, x=25, x=26, x=27, x=28, x=29, x=30, x=40, x=50, x=60, x=70, x=80, x=90, x=100, x=110, x=125, x=150, x=175, x=200, x=225, x=250, or x=271), provided that the TREM has one or both of the following properties: no more than 15% of the residues are N; or no more than 20 residues are absent.

### Glutamine TREM Consensus Sequence

[0607] In an embodiment, a TREM disclosed herein comprises the sequence of Formula I GLN (SEQ ID NO: 577),
[0608] R₀-R₁-R₂-R₃-R₄-R₅-R₆-R₇-R₈-R₉-R₁₀-R₁₁-R₁₂-R₁₃-R₁₄-R₁₅-R₁₆-R₁₇-R₁₈-R₁₉-R₂₀-R₂₁-R₂₂-R₂₃-R₂₄-R₂₅-R₂₆-R₂₇-R₂₈-R₂₉-R₃₀-R₃₁-R₃₂-R₃₃-R₃₄-R₃₅-R₃₆-R₃₇-R₃₈-R₃₉-R₄₀-R₄₁-R₄₂-R₄₃- R₄₄-R₄₅-R₄₆-[R₄₇]ₓ-R₄₈-R₄₉-R₅₀-R₅₁-R₅₂-R₅₃-R₅₄-R₅₅-R₅₆-R₅₇-R₅₈-R₅₉-R₆₀-R₆₁-R₆₂-R₆₃-R₆₄-R₆₅- R₆₆-R₆₇-R₆₈-R₆₉-R₇₀-R₇₁-R₇₂
   wherein R is a ribonucleotide residue and the consensus for Gln is:
[0609] R₀, R₁₈=are absent;
[0610] R₁₄, R₂₄, R₅₇=are independently A or absent;
[0611] R₀, R₂₆, R₂₇, R₃₃, R₅₆=are independently A, C, G or absent;
[0612] R₂, R₄, R₅, R₆, R₁₂, R₁₃, R₁₆, R₂₁, R₂₂, R₂₅, R₂₉, R₃₀, R₃₁, R₃₂, R₃₄, R₄₁, R₄₂, R₄₄, R₄₅, R₄₆, R₄₈, R₄₉, R₅₀, R₅₈,R 62, R₆₃, R₆₆, R₆₇, R₆₈, R₆₉, R₇₀=are independently N or absent;
[0613] R₁₇, R₂₃, R₄₃, R₆₅, R₇₁=are independently A, C, U or absent;
[0614] R₁₅, R₄₀, R₅₁, R₅₂=are independently A, G or absent;
[0615] R₁, R₇, R₇₂=are independently A, G, U or absent;
[0616] R₃, R₁₁, R₃₇, R₆₀, R₆₄=are independently C, G, U or absent;
[0617] R₂₈, R₃₅, R₅₅, R₅₉, R₆₁=are independently C, U or absent;
[0618] R₁₀, R₁₉, R₂₀=are independently G or absent;
[0619] R₃₉=G, U or absent;
[0620] R₈, R₃₆, R₃₈, R₅₃, R₅₄=are independently U or absent;
[0621] [R₄₇]ₓ=N or absent;
[0622] wherein, e.g., x=1-271 (e.g., x=1-250, x=1-225, x=1-200, x=1-175, x=1-150, x=1-125, x=1-100, x=1-75, x=1-50, x=1-40, x=1-30, x=1-29, x=1-28, x=1-27, x=1-26, x=1-25, x=1-24, x=1-23, x=1-22, x=1-21, x=1-20, x=1-19, x=1-18, x=1-17, x=1-16, x=1-15, x=1-14, x=1-13, x=1-12, x=1-11, x=1-10, x=10-271, x=20-271, x=30-271, x=40-271, x=50-271, x=60-271, x=70-271, x=80-271, x=100-271, x=125-271, x=150-271, x=175-271, x=200-271, x=225-271, x=1, x=2, x=3, x=4, x=5, x=6, x=7, x=8, x=9, x=10, x=11, x=12, x=13, x=14, x=15, x=16, x=17, x=18, x=19, x=20, x=21, x=22, x=23, x=24, x=25, x=26, x=27, x=28, x=29, x=30, x=40, x=50, x=60, x=70, x=80, x=90, x=100, x=110, x=125, x=150, x=175, x=200, x=225, x=250, or x=271), provided that the TREM has one or both of the following properties: no more than 15% of the residues are N; or no more than 20 residues are absent.

[0623] In an embodiment, a TREM disclosed herein comprises the sequence of Formula II GLN (SEQ ID NO: 578),
[0624] R₀-R₁-R₂-R₃-R₄-R₅-R₆-R₇-R₈-R₉-R₁₀-R₁₁-R₁₂-R₁₃-R₁₄-R₁₅-R₁₆-R₁₇-R₁₈-R₁₉-R₂₀-R₂₁-R₂₂-R₂₃-R₂₄-R₂₅-R₂₆-R₂₇-R₂₈-R₂₉-R₃₀-R₃₁-R₃₂-R₃₃-R₃₄-R₃₅-R₃₆-R₃₇-R₃₈-R₃₉-R₄₀-R₄₁-R₄₂-R₄₃- R₄₄-R₄₅-R₄₆-[R₄₇]ₓ-R₄₈-R₄₉-R₅₀-R₅₁-R₅₂-R₅₃-R₅₄-R₅₅-R₅₆-R₅₇-R₅₈-R₅₉-R₆₀-R₆₁-R₆₂-R₆₃-R₆₄-R₆₅- R₆₆-R₆₇-R₆₈-R₆₉-R₇₀-R₇₁-R₇₂
   wherein R is a ribonucleotide residue and the consensus for Gln is:
[0625] R₀, R₁₈, R₂₃=are absent
[0626] R₁₄, R₂₄, R₅₇=are independently A or absent;
[0627] R₁₇, R₇₁=are independently A, C or absent;
[0628] R₂₅, R₂₆, R₃₃, R₄₄, R₄₆, R₅₆, R₆₉=are independently A, C, G or absent;
[0629] R₄, R₅, R₁₂, R₂₂, R₂₉, R₃₀, R₄₈, R₄₉, R₆₃, R₆₇, R₆₈=are independently N or absent;
[0630] R₃₁, R₄₃, R₆₂, R₆₅, R₇₀=are independently A, C, U or absent;
[0631] R₁₅, R₂₇, R₃₄, R₄₀, R₄₁, R₅₁, R₅₂=are independently A, G or absent;
[0632] R₂, R₇, R₂₁, R₄₅, R₅₀, R₅₈, R₆₆, R₇₂=are independently A, G, U or absent;
[0633] R₃, R₁₃, R₃₂, R₃₇, R₄₂, R₆₀, R₆₄=are independently C, G, U or absent;
[0634] R₆, R₁, R₂₈, R₃₅, R₅₅, R₅₉, R₆₁=are independently C, U or absent;
[0635] R₀, R₁₀, R₁₉, R₂₀=are independently G or absent;
[0636] R₁, R₁₆, R₃₉=are independently G, U or absent;
[0637] R₈, R₃₆, R₃₈, R₅₃, R₅₄=are independently U or absent;
[0638] [R₄₇]ₓ=N or absent;
[0639] wherein, e.g., x=1-271 (e.g., x=1-250, x=1-225, x=1-200, x=1-175, x=1-150, x=1-125, x=1-100, x=1-75, x=1-50, x=1-40, x=1-30, x=1-29, x=1-28, x=1-27, x=1-26, x=1-25, x=1-24, x=1-23, x=1-22, x=1-21, x=1-20, x=1-19, x=1-18, x=1-17, x=1-16, x=1-15, x=1-14, x=1-13, x=1-12, x=1-11, x=1-10, x=10-271, x=20-271, x=30-271, x=40-271, x=50-271, x=60-271, x=70-271, x=80-271, x=100-271, x=125-271, x=150-271, x=175-271, x=200-271, x=225-271, x=1, x=2, x=3, x=4, x=5, x=6, x=7, x=8, x=9, x=10, x=11, x=12, x=13, x=14, x=15, x=16, x=17, x=18, x=19, x=20, x=21, x=22, x=23, x=24, x=25, x=26, x=27, x=28, x=29, x=30, x=40, x=50, x=60, x=70, x=80, x=90, x=100, x=110, x=125, x=150, x=175, x=200, x=225, x=250, or x=271), provided that the TREM has one or both of the following properties: no more than 15% of the residues are N; or no more than 20 residues are absent.

[0640] In an embodiment, a TREM disclosed herein comprises the sequence of Formula III GLN (SEQ ID NO: 579),
[0641] R₀-R₁-R₂-R₃-R₄-R₅-R₆-R₇-R₈-R₉-R₁₀-R₁₁-R₁₂-R₁₃-R₁₄-R₁₅-R₁₆-R₁₇-R₁₈-R₁₉-R₂₀-R₂₁-R₂₂-R₂₃-R₂₄-R₂₅-R₂₆-R₂₇-R₂₈-R₂₉-R₃₀-R₃₁-R₃₂-R₃₃-R₃₄-R₃₅-R₃₆-R₃₇-R₃₈-R₃₉-R₄₀-R₄₁-R₄₂-R₄₃- R₄₄-R₄₅-R₄₆-[R₄₇]ₓ-R₄₈-R₄₉-R₅₀-R₅₁-R₅₂-R₅₃-R₅₄-R₅₅-R₅₆-R₅₇-R₅₈-R₅₉-R₆₀-R₆₁-R₆₂-R₆₃-R₆₄-R₆₅- R₆₆-R₆₇-R₆₈-R₆₉-R₇₀-R₇₁-R₇₂
   wherein R is a ribonucleotide residue and the consensus for Gln is:
[0642] R₀, R₁₈, R₂₃=are absent
[0643] R₁₄, R₂₄, R₄₁, R₅₇=are independently A or absent;
[0644] R₁₇, R₇₁=are independently A, C or absent;
[0645] R₅, R₂₅, R₂₆, R₄₆, R₅₆, R₆₉=are independently A, C, G or absent;
[0646] R₄, R₂₂, R₂₉, R₃₀, R₄₈, R₄₉, R₆₃, R₆₈=are independently N or absent;
[0647] R₄₃, R₆₂, R₆₅, R₇₀=are independently A, C, U or absent;
[0648] R₁₅, R₂₇, R₃₃, R₃₄, R₄₀, R₅₁, R₅₂=are independently A, G or absent;
[0649] R₂, R₇, R₁₂, R₄₅, R₅₀, R₅₈, R₆₆=are independently A, G, U or absent;
[0650] R₃₁=A, U or absent;
[0651] R₃₂, R₄₄, R₆₀=are independently C, G or absent;
[0652] R₃, R₁₃, R₃₇, R₄₂, R₆₄, R₆₇=are independently C, G, U or absent;
[0653] R₆, R₁, R₂₈, R₃₅, R₅₅, R₅₉, R₆₁=are independently C, U or absent;
[0654] R₉, R₁₀, R₁₉, R₂₀=are independently G or absent;
[0655] R₁, R₂₁, R₃₉, R₇₂=are independently G, U or absent;
[0656] R₈, R₁₆, R₃₆, R₃₈, R₅₃, R₅₄=are independently U or absent;
[0657] [R₄₇]ₓ=N or absent;
[0658] wherein, e.g., x=1-271 (e.g., x=1-250, x=1-225, x=1-200, x=1-175, x=1-150, x=1-125, x=1-100, x=1-75, x=1-50, x=1-40, x=1-30, x=1-29, x=1-28, x=1-27, x=1-26, x=1-25, x=1-24, x=1-23, x=1-22, x=1-21, x=1-20, x=1-19, x=1-18, x=1-17, x=1-16, x=1-15, x=1-14, x=1-13, x=1-12, x=1-11, x=1-10, x=10-271, x=20-271, x=30-271, x=40-271, x=50-271, x=60-271, x=70-271, x=80-271, x=100-271, x=125-271, x=150-271, x=175-271, x=200-271, x=225-271, x=1, x=2, x=3, x=4, x=5, x=6, x=7, x=8, x=9, x=10, x=11, x=12, x=13, x=14, x=15, x=16, x=17, x=18, x=19, x=20, x=21, x=22, x=23, x=24, x=25, x=26, x=27, x=28, x=29, x=30, x=40, x=50, provided that the TREM has one or both of the following properties: no more than 15% of the residues are N; or no more than 20 residues are absent.

### Glutamate TREM Consensus Sequence

[0659] In an embodiment, a TREM disclosed herein comprises the sequence of Formula I GLU (SEQ ID NO: 580),
[0660] R₀-R₁-R₂-R₃-R₄-R₅-R₆-R₇-R₈-R₉-R₁₀-R₁₁-R₁₂-R₁₃-R₁₄-R₁₅-R₁₆-R₁₇-R₁₈-R₁₉-R₂₀-R₂₁-R₂₂-R₂₃-R₂₄-R₂₅-R₂₆-R₂₇-R₂₈-R₂₉-R₃₀-R₃₁-R₃₂-R₃₃-R₃₄-R₃₅-R₃₆-R₃₇-R₃₈-R₃₉-R₄₀-R₄₁-R₄₂-R₄₃- R₄₄-R₄₅-R₄₆-[R₄₇]ₓ-R₄₈-R₄₉-R₅₀-R₅₁-R₅₂-R₅₃-R₅₄-R₅₅-R₅₆-R₅₇-R₅₈-R₅₉-R₆₀-R₆₁-R₆₂-R₆₃-R₆₄-R₆₅- R₆₆-R₆₇-R₆₈-R₆₉-R₇₀-R₇₁-R₇₂
   wherein R is a ribonucleotide residue and the consensus for Glu is:
[0661] R₀=absent;
[0662] R₃₄, R₄₃, R₆₈, R₆₉=are independently A, C, G or absent;
[0663] R₁, R₂, R₅, R₆, R₉, R₁₂, R₁₆, R₂₀, R₂₁, R₂₆, R₂₇, R₂₉, R₃₀, R₃₁, R₃₂, R₃₃, R₄₁, R₄₄, R₄₅, R₄₆, R₄₈, R₅₀, R₅₁, R₅₈, R₆₃, R₆₄, R₆₅, R₆₆, R₇₀, R₇₁=are independently N or absent;
[0664] R₁₃, R₁₇, R₂₃, R₆₁=are independently A, C, U or absent;
[0665] R₁₀, R₁₄, R₂₄, R₄₀, R₅₂, R₅₆=are independently A, G or absent;
[0666] R₇, R₁₅, R₂₅, R₆₇, R₇₂=are independently A, G, U or absent;
[0667] R₁₁, R₅₇=are independently A, U or absent;
[0668] R₃₉=C, G or absent;
[0669] R₃, R₄, R₂₂, R₄₂, R₄₉, R₅₅, R₆₂=are independently C, G, U or absent;
[0670] R₁₈, R₂₈, R₃₅, R₃₇, R₅₃, R₅₉, R₆₀=are independently C, U or absent;
[0671] R₁₉=G or absent;
[0672] R₈, R₃₆, R₃₈, R₅₄=are independently U or absent;
[0673] [R₄₇]ₓ=N or absent;
[0674] wherein, e.g., x=1-271 (e.g., x=1-250, x=1-225, x=1-200, x=1-175, x=1-150, x=1-125, x=1-100, x=1-75, x=1-50, x=1-40, x=1-30, x=1-29, x=1-28, x=1-27, x=1-26, x=1-25, x=1-24, x=1-23, x=1-22, x=1-21, x=1-20, x=1-19, x=1-18, x=1-17, x=1-16, x=1-15, x=1-14, x=1-13, 271, x-80-271, x=100-271, x=125-271, x=150-271, x=175-271, x=200-271, x=225-271, x=1, x=2, x=3, x=4, x=5, x=6, x=7, x=8, x=9, x=10, x=11, x=12, x=13, x=14, x=15, x=16, x=17, x=18, x=19, x=20, x=21, x=22, x=23, x=24, x=25, x=26, x=27, x=28, x=29, x=30, x=40, x=50, x=60, x=70, x=80, x=90, x=100, x=110, x=125, x=150, x=175, x=200, x=225, x=250, or x=271), provided that the TREM has one or both of the following properties: no more than 15% of the residues are N; or no more than 20 residues are absent.

[0675] In an embodiment, a TREM disclosed herein comprises the sequence of Formula II GLU (SEQ ID NO: 581),
[0676] R₀-R₁-R₂-R₃-R₄-R₅-R₆-R₇-R₈-R₉-R₁₀-R₁₁-R₁₂-R₁₃-R₁₄-R₁₅-R₁₆-R₁₇-R₁₈-R₁₉-R₂₀-R₂₁-R₂₂-R₂₃-R₂₄-R₂₅-R₂₆-R₂₇-R₂₈-R₂₉-R₃₀-R₃₁-R₃₂-R₃₃-R₃₄-R₃₅-R₃₆-R₃₇-R₃₈-R₃₉-R₄₀-R₄₁-R₄₂-R₄₃- R₄₄-R₄₅-R₄₆-[R₄₇]ₓ-R₄₈-R₄₉-R₅₀-R₅₁-R₅₂-R₅₃-R₅₄-R₅₅-R₅₆-R₅₇-R₅₈-R₅₉-R₆₀-R₆₁-R₆₂-R₆₃-R₆₄-R₆₅- R₆₆-R₆₇-R₆₈-R₆₉-R₇₀-R₇₁-R₇₂
   wherein R is a ribonucleotide residue and the consensus for Glu is:
[0677] R₀, R₁₈, R₂₃=are absent
[0678] R₁₇, R₄₀=are independently A or absent;
[0679] R₂₆, R₂₇, R₃₄, R₄₃, R₆₈, R₆₉, R₇₁=are independently A, C, G or absent;
[0680] R₁, R₂, R₅, R₁₂, R₂₁, R₃₁, R₃₃, R₄₁, R₄₅, R₄₈, R₅₁, R₅₈, R₆₆, R₇₀=are independently N or absent;
[0681] R₄₄, R₆₁=are independently A, C, U or absent;
[0682] R₀, R₁₄, R₂₄, R₂₅, R₅₂, R₅₆, R₆₃=are independently A, G or absent;
[0683] R₇, R₁₅, R₄₆, R₅₀, R₆₇, R₇₂=are independently A, G, U or absent;
[0684] R₂₉, R₅₇=are independently A, U or absent;
[0685] R₆₀=C or absent;
[0686] R₃₉=C, G or absent;
[0687] R₃, R₆, R₂₀, R₃₀, R₃₂, R₄₂, R₅₅, R₆₂, R₆₅=are independently C, G, U or absent;
[0688] R₄, R₈, R₁₆, R₂₈, R₃₅, R₃₇, R₄₉, R₅₃, R₅₉=are independently C, U or absent;
[0689] R₁₀, R₁₉=are independently G or absent;
[0690] R₂₂, R₆₄=are independently G, U or absent;
[0691] R₁, R₁₃, R₃₆, R₃₈, R₅₄=are independently U or absent;
[0692] [R₄₇]ₓ=N or absent;
[0693] wherein, e.g., x=1-271 (e.g., x=1-250, x=1-225, x=1-200, x=1-175, x=1-150, x=1-125, x=1-100, x=1-75, x=1-50, x=1-40, x=1-30, x=1-29, x=1-28, x=1-27, x=1-26, x=1-25, x=1-24, x=1-23, x=1-22, x=1-21, x=1-20, x=1-19, x=1-18, x=1-17, x=1-16, x=1-15, x=1-14, x=1-13, x=1-12, x=1-11, x=1-10, x=10-271, x=20-271, x=30-271, x=40-271, x=50-271, x=60-271, x=70-271, x=80-271, x=100-271, x=125-271, x=150-271, x=175-271, x=200-271, x=225-271, x=1, x=2, x=3, x=4, x=5, x=6, x=7, x=8, x=9, x=10, x=11, x=12, x=13, x=14, x=15, x=16, x=17, x=18, x=19, x=20, x=21, x=22, x=23, x=24, x=25, x=26, x=27, x=28, x=29, x=30, x=40, x=50, x=60, x=70, x=80, x=90, x=100, x=110, x=125, x=150, x=175, x=200, x=225, x=250, or x=271), provided that the TREM has one or both of the following properties: no more than 15% of the residues are N; or no more than 20 residues are absent.

[0694] In an embodiment, a TREM disclosed herein comprises the sequence of Formula III GLU (SEQ ID NO: 582),
[0695] R₀-R₁-R₂-R₃-R₄-R₅-R₆-R₇-R₈-R₉-R₁₀-R₁₁-R₁₂-R₁₃-R₁₄-R₁₅-R₁₆-R₁₇-R₁₈-R₁₉-R₂₀-R₂₁-R₂₂-R₂₃-R₂₄-R₂₅-R₂₆-R₂₇-R₂₈-R₂₉-R₃₀-R₃₁-R₃₂-R₃₃-R₃₄-R₃₅-R₃₆-R₃₇-R₃₈-R₃₉-R₄₀-R₄₁-R₄₂-R₄₃- R₄₄-R₄₅-R₄₆-[R₄₇]ₓ-R₄₈-R₄₉-R₅₀-R₅₁-R₅₂-R₅₃-R₅₄-R₅₅-R₅₆-R₅₇-R₅₈-R₅₉-R₆₀-R₆₁-R₆₂-R₆₃-R₆₄-R₆₅- R₆₆-R₆₇-R₆₈-R₆₉-R₇₀-R₇₁-R₇₂
   wherein R is a ribonucleotide residue and the consensus for Glu is:
[0696] R₀, R₁₇, R₁₈, R₂₃=are absent
[0697] R₁₄, R₂₇, R₄₀, R₇₁=are independently A or absent;
[0698] R₄₄=A, C or absent;
[0699] R₄₃=A, C, G or absent;
[0700] R₁, R₃₁, R₃₃, R₄₅, R₅₁, R₆₆=are independently N or absent;
[0701] R₂₁, R₄₁=are independently A, C, U or absent;
[0702] R₇, R₂₄, R₂₅, R₅₀, R₅₂, R₅₆, R₆₃, R₆₈, R₇₀=are independently A, G or absent;
[0703] R₅, R₄₆=are independently A, G, U or absent;
[0704] R₂₉, R₅₇, R₆₇, R₇₂=are independently A, U or absent;
[0705] R₂, R₃₉, R₆₀=are independently C or absent;
[0706] R₃, R₁₂, R₂₀, R₂₆, R₃₄, R₆₉=are independently C, G or absent;
[0707] R₆, R₃₀, R₄₂, R₄₈, R₆₅=are independently C, G, U or absent;
[0708] R₄, R₁₆, R₂₈, R₃₅, R₃₇, R₄₉, R₅₃, R₅₅, R₅₈, R₆₁, R₆₂=are independently C, U or absent;
[0709] R₉, R₁₀, R₁₉, R₆₄=are independently G or absent;
[0710] R₁₅, R₂₂, R₃₂=are independently G, U or absent;
[0711] R₈, R₁, R₁₃, R₃₆, R₃₈, R₅₄, R₅₉=are independently U or absent;
[0712] [R₄₇]ₓ=N or absent;
[0713] wherein, e.g., x=1-271 (e.g., x=1-250, x=1-225, x=1-200, x=1-175, x=1-150, x=1-125, x=1-100, x=1-75, x=1-50, x=1-40, x=1-30, x=1-29, x=1-28, x=1-27, x=1-26, x=1-25, x=1-24, x=1-23, x=1-22, x=1-21, x=1-20, x=1-19, x=1-18, x=1-17, x=1-16, x=1-15, x=1-14, x=1-13, x=1-12, x=1-11, x=1-10, x=10-271, x=20-271, x=30-271, x=40-271, x=50-271, x=60-271, x=70-271, x=80-271, x=100-271, x=125-271, x=150-271, x=175-271, x=200-271, x=225-271, x=1, x=2, x=3, x=4, x=5, x=6, x=7, x=8, x=9, x=10, x=11, x=12, x=13, x=14, x=15, x=16, x=17, x=18, x=19, x=20, x=21, x=22, x=23, x=24, x=25, x=26, x=27, x=28, x=29, x=30, x=40, x=50, x=60, x=70, x=80, x=90, x=100, x=110, x=125, x=150, x=175, x=200, x=225, x=250, or x=271), provided that the TREM has one or both of the following properties: no more than 15% of the residues are N; or no more than 20 residues are absent.

### Glycine TREM Consensus Sequence

[0714] In an embodiment, a TREM disclosed herein comprises the sequence of Formula I GLY (SEQ ID NO: 583),
[0715] R₀-R₁-R₂-R₃-R₄-R₅-R₆-R₇-R₈-R₉-R₁₀-R₁₁-R₁₂-R₁₃-R₁₄-R₁₅-R₁₆-R₁₇-R₁₈-R₁₉-R₂₀-R₂₁-R₂₂-R₂₃-R₂₄-R₂₅-R₂₆-R₂₇-R₂₈-R₂₉-R₃₀-R₃₁-R₃₂-R₃₃-R₃₄-R₃₅-R₃₆-R₃₇-R₃₈-R₃₉-R₄₀-R₄₁-R₄₂-R₄₃- R₄₄-R₄₅-R₄₆-[R₄₇]ₓ-R₄₈-R₄₉-R₅₀-R₅₁-R₅₂-R₅₃-R₅₄-R₅₅-R₅₆-R₅₇-R₅₈-R₅₉-R₆₀-R₆₁-R₆₂-R₆₃-R₆₄-R₆₅- R₆₆-R₆₇-R₆₈-R₆₉-R₇₀-R₇₁-R₇₂
   wherein R is a ribonucleotide residue and the consensus for Gly is:
[0716] R₀=absent;
[0717] R₂₄=A or absent;
[0718] R₃, R₉, R₄₀, R₅₀, R₅₁=are independently A, C, G or absent;
[0719] R₄, R₅, R₆, R₇, R₁₂, R₁₆, R₂₁, R₂₂, R₂₆, R₂₉, R₃₀, R₃₁, R₃₂, R₃₃, R₃₄, R₄₁, R₄₂, R₄₃, R₄₄, R₄₅, R₄₆, R₄₈, R₄₉, R₅₈, R₆₃, R₆₄, R₆₅, R₆₆, R₆₇, R₆₈=are independently N or absent;
[0720] R₅₉=A, C, U or absent;
[0721] R₁, R₁₀, R₁₄, R₁₅, R₂₇, R₅₆=are independently A, G or absent;
[0722] R₂₀, R₂₅=are independently A, G, U or absent;
[0723] R₅₇, R₇₂=are independently A, U or absent;
[0724] R₃₈, R₃₉, R₆₀=are independently C or absent;
[0725] R₅₂=C, G or absent;
[0726] R₂, R₁₉, R₃₇, R₅₄, R₅₅, R₆₁, R₆₂, R₆₉, R₇₀=are independently C, G, U or absent;
[0727] R₁₁, R₁₃, R₁₇, R₂₈, R₃₅, R₃₆, R₇₁=are independently C, U or absent;
[0728] R₈, R₁₈, R₂₃, R₅₃=are independently U or absent;
[0729] [R₄₇]ₓ=N or absent;
[0730] wherein, e.g., x=1-271 (e.g., x=1-250, x=1-225, x=1-200, x=1-175, x=1-150, x=1-125, x=1-100, x=1-75, x=1-50, x=1-40, x=1-30, x=1-29, x=1-28, x=1-27, x=1-26, x=1-25, x=1-24, x=1-23, x=1-22, x=1-21, x=1-20, x=1-19, x=1-18, x=1-17, x=1-16, x=1-15, x=1-14, x=1-13, x=1-12, x=1-11, x=1-10, x=10-271, x=20-271, x=30-271, x=40-271, x=50-271, x=60-271, x=70-271, x=80-271, x=100-271, x=125-271, x=150-271, x=175-271, x=200-271, x=225-271, x=1, x=2, x=3, x=4, x=5, x=6, x=7, x=8, x=9, x=10, x=11, x=12, x=13, x=14, x=15, x=16, x=17, x=18, x=19, x=20, x=21, x=22, x=23, x=24, x=25, x=26, x=27, x=28, x=29, x=30, x=40, x=50, x=60, x=70, x=80, x=90, x=100, x=110, x=125, x=150, x=175, x=200, x=225, x=250, or x=271), provided that the TREM has one or both of the following properties: no more than 15% of the residues arc N; or no more than 20 residues arc absent.

[0731] In an embodiment, a TREM disclosed herein comprises the sequence of Formula II GLY (SEQ ID NO: 584),
[0732] R₀-R₁-R₂-R₃-R₄-R₅-R₆-R₇-R₈-R₉-R₁₀-R₁₁-R₁₂-R₁₃-R₁₄-R₁₅-R₁₆-R₁₇-R₁₈-R₁₉-R₂₀-R₂₁-R₂₂-R₂₃-R₂₄-R₂₅-R₂₆-R₂₇-R₂₈-R₂₉-R₃₀-R₃₁-R₃₂-R₃₃-R₃₄-R₃₅-R₃₆-R₃₇-R₃₈-R₃₉-R₄₀-R₄₁-R₄₂-R₄₃- R₄₄-R₄₅-R₄₆-[R₄₇]ₓ-R₄₈-R₄₉-R₅₀-R₅₁-R₅₂-R₅₃-R₅₄-R₅₅-R₅₆-R₅₇-R₅₈-R₅₉-R₆₀-R₆₁-R₆₂-R₆₃-R₆₄-R₆₅- R₆₆-R₆₇-R₆₈-R₆₉-R₇₀-R₇₁-R₇₂
   wherein R is a ribonucleotide residue and the consensus for Gly is:
[0733] R₀, R₁₈, R₂₃=are absent
[0734] R₂₄, R₂₇, R₄₀, R₇₂=are independently A or absent;
[0735] R₂₆=A, C or absent;
[0736] R₃, R₇, R₆₈=are independently A, C, G or absent;
[0737] R₅, R₃₀, R₄₁, R₄₂, R₄₄, R₄₉, R₆₇=are independently A, C, G, U or absent;
[0738] R₃₁, R₃₂, R₃₄=are independently A, C, U or absent;
[0739] R₀, R₁₀, R₁₄, R₁₅, R₃₃, R₅₀, R₅₆=are independently A, G or absent;
[0740] R₁₂, R₁₆, R₂₂, R₂₅, R₂₉, R₄₆=are independently A, G, U or absent;
[0741] R₅₇=A, U or absent;
[0742] R₁₇, R₃₈, R₃₉, R₆₀, R₆₁, R₇₁=are independently C or absent;
[0743] R₆, R₅₂, R₆₄, R₆₆=are independently C, G or absent;
[0744] R₂, R₄, R₃₇, R₄₈, R₅₅, R₆₅=are independently C, G, U or absent;
[0745] R₁₃, R₃₅, R₄₃, R₆₂, R₆₉=are independently C, U or absent;
[0746] R₁, R₁₉, R₂₀, R₅₁, R₇₀=are independently G or absent;
[0747] R₂₁, R₄₅, R₆₃=are independently G, U or absent;
[0748] R₈, R₁, R₂₈, R₃₆, R₅₃, R₅₄, R₅₈, R₅₉=are independently U or absent;
[0749] [R₄₇]ₓ=N or absent;
[0750] wherein, e.g., x=1-271 (e.g., x=1-250, x=1-225, x=1-200, x=1-175, x=1-150, x=1-125, x=1-100, x=1-75, x=1-50, x=1-40, x=1-30, x=1-29, x=1-28, x=1-27, x=1-26, x=1-25, x=1-24, x=1-23, x=1-22, x=1-21, x=1-20, x=1-19, x=1-18, x=1-17, x=1-16, x=1-15, x=1-14, x=1-13, x=1-12, x=1-11, x=1-10, x=10-271, x=20-271, x=30-271, x=40-271, x=50-271, x=60-271, x=70-271, x=80-271, x=100-271, x=125-271, x=150-271, x=175-271, x=200-271, x=225-271, x=1, x=2, x=3, x=4, x=5, x=6, x=7, x=8, x=9, x=10, x=11, x=12, x=13, x=14, x=15, x=16, x=17, x=18, x=19, x=20, x=21, x=22, x=23, x=24, x=25, x=26, x=27, x=28, x=29, x=30, x=40, x=50, x=60, x=70, x=80, x=90, x=100, x=110, x=125, x=150, x=175, x=200, x=225, x=250, or x=271), provided that the TREM has one or both of the following properties: no more than 15% of the residues are N; or no more than 20 residues are absent.

[0751] In an embodiment, a TREM disclosed herein comprises the sequence of Formula III GLY (SEQ ID NO: 585),
[0752] R₀-R₁-R₂-R₃-R₄-R₅-R₆-R₇-R₈-R₉-R₁₀-R₁₁-R₁₂-R₁₃-R₁₄-R₁₅-R₁₆-R₁₇-R₁₈-R₁₉-R₂₀-R₂₁-R₂₂-R₂₃-R₂₄-R₂₅-R₂₆-R₂₇-R₂₈-R₂₉-R₃₀-R₃₁-R₃₂-R₃₃-R₃₄-R₃₅-R₃₆-R₃₇-R₃₈-R₃₉-R₄₀-R₄₁-R₄₂-R₄₃- R₄₄-R₄₅-R₄₆-[R₄₇]ₓ-R₄₈-R₄₉-R₅₀-R₅₁-R₅₂-R₅₃-R₅₄-R₅₅-R₅₆-R₅₇-R₅₈-R₅₉-R₆₀-R₆₁-R₆₂-R₆₃-R₆₄-R₆₅- R₆₆-R₆₇-R₆₈-R₆₉-R₇₀-R₇₁-R₇₂
   wherein R is a ribonucleotide residue and the consensus for Gly is:
[0753] R₀, R₁₈, R₂₃=are absent
[0754] R₂₄, R₂₇, R₄₀, R₇₂=are independently A or absent;
[0755] R₂₆=A, C or absent;
[0756] R₃, R₇, R₄₉, R₆₈=are independently A, C, G or absent;
[0757] R₅, R₃₀, R₄₁, R₄₄, R₆₇=are independently N or absent;
[0758] R₃₁, R₃₂, R₃₄=are independently A, C, U or absent;
[0759] R₀, R₁₀, R₁₄, R₁₅, R₃₃, R₅₀, R₅₆=are independently A, G or absent;
[0760] R₁₂, R₂₅, R₂₉, R₄₂, R₄₆=are independently A, G, U or absent;
[0761] R₁₆, R₅₇=are independently A, U or absent;
[0762] R₁₇, R₃₈, R₃₉, R₆₀, R₆₁, R₇₁=are independently C or absent;
[0763] R₆, R₅₂, R₆₄, R₆₆=are independently C, G or absent;
[0764] R₃₇, R₄₈, R₆₅=are independently C, G, U or absent;
[0765] R₂, R₄, R₁₃, R₃₅, R₄₃, R₅₅, R₆₂, R₆₉=are independently C, U or absent;
[0766] R₁, R₁₉, R₂₀, R₅₁, R₇₀=are independently G or absent;
[0767] R₂₁, R₂₂, R₄₅, R₆₃=are independently G, U or absent;
[0768] R₈, R₁₁, R₂₈, R₃₆, R₅₃, R₅₄, R₅₈, R₅₉=are independently U or absent;
[0769] [R₄₇]ₓ=N or absent;
[0770] wherein, e.g., x=1-271 (e.g., x=1-250, x=1-225, x=1-200, x=1-175, x=1-150, x=1-125, x=1-100, x=1-75, x=1-50, x=1-40, x=1-30, x=1-29, x=1-28, x=1-27, x=1-26, x=1-25, x=1-24, x=1-23, x=1-22, x=1-21, x=1-20, x=1-19, x=1-18, x=1-17, x=1-16, x=1-15, x=1-14, x=1-13, x=1-12, x=1-11, x=1-10, x=10-271, x=20-271, x=30-271, x=40-271, x=50-271, x=60-271, x=70-271, x=80-271, x=100-271, x=125-271, x=150-271, x=175-271, x=200-271, x=225-271, x=1, x=2, x=3, x=4, x=5, x=6, x=7, x=8, x=9, x=10, x=11, x=12, x=13, x=14, x=15, x=16, x=17, x=18, x=19, x=20, x=21, x=22, x=23, x=24, x=25, x=26, x=27, x=28, x=29, x=30, x=40, x=50, x=60, x=70, x=80, x=90, x=100, x=110, x=125, x=150, x=175, x=200, x=225, x=250, or x=271), provided that the TREM has one or both of the following properties: no more than 15% of the residues are N; or no more than 20 residues are absent.

### Histidine TREM Consensus Sequence

[0771] In an embodiment, a TREM disclosed herein comprises the sequence of Formula I HIS (SEQ ID NO: 586),
[0772] R₀-R₁-R₂-R₃-R₄-R₅-R₆-R₇-R₈-R₉-R₁₀-R₁₁-R₁₂-R₁₃-R₁₄-R₁₅-R₁₆-R₁₇-R₁₈-R₁₉-R₂₀-R₂₁-R₂₂-R₂₃-R₂₄-R₂₅-R₂₆-R₂₇-R₂₈-R₂₉-R₃₀-R₃₁-R₃₂-R₃₃-R₃₄-R₃₅-R₃₆-R₃₇-R₃₈-R₃₉-R₄₀-R₄₁-R₄₂-R₄₃- R₄₄-R₄₅-R₄₆-[R₄₇]ₓ-R₄₈-R₄₉-R₅₀-R₅₁-R₅₂-R₅₃-R₅₄-R₅₅-R₅₆-R₅₇-R₅₈-R₅₉-R₆₀-R₆₁-R₆₂-R₆₃-R₆₄-R₆₅- R₆₆-R₆₇-R₆₈-R₆₉-R₇₀-R₇₁-R₇₂
   wherein R is a ribonucleotide residue and the consensus for His is:
[0773] R₂₃=absent;
[0774] R₁₄, R₂₄, R₅₇=are independently A or absent;
[0775] R₇₂=A, C or absent;
[0776] R₉, R₂₇, R₄₃, R₄₈, R₆₉=are independently A, C, G or absent;
[0777] R₃, R₄, R₅, R₆, R₁₂, R₂₅, R₂₆, R₂₉, R₃₀, R₃₁, R₃₄, R₄₂, R₄₅, R₄₆, R₄₉, R₅₀, R₅₈, R₆₂, R₆₃, R₆₆, R₆₇, R₆₈=are independently N or absent;
[0778] R₁₃, R₂₁, R₄₁, R₄₄, R₆₅=are independently A, C, U or absent;
[0779] R₄₀, R₅₁, R₅₆, R₇₀=are independently A, G or absent;
[0780] R₇, R₃₂=are independently A, G, U or absent;
[0781] R₅₅, R₆₀=are independently C or absent;
[0782] R₁₁, R₁₆, R₃₃, R₆₄=are independently C, G, U or absent;
[0783] R₂, R₁₇, R₂₂, R₂₈, R₃₅, R₅₃, R₅₉, R₆₁, R₇₁=are independently C, U or absent;
[0784] R₁, R₁₀, R₁₅, R₁₉, R₂₀, R₃₇, R₃₉, R₅₂=are independently G or absent;
[0785] R₀=G, U or absent;
[0786] R₈, R₁₈, R₃₆, R₃₈, R₅₄=are independently U or absent;
[0787] [R₄₇]ₓ=N or absent;
[0788] wherein, e.g., x=1-271 (e.g., x=1-250, x=1-225, x=1-200, x=1-175, x=1-150, x=1-125, x=1-100, x=1-75, x=1-50, x=1-40, x=1-30, x=1-29, x=1-28, x=1-27, x=1-26, x=1-25, x=1-24, x=1-23, x=1-22, x=1-21, x=1-20, x=1-19, x=1-18, x=1-17, x=1-16, x=1-15, x=1-14, x=1-13, 271, x=80-271, x=100-271, x=125-271, x=150-271, x=175-271, x=200-271, x=225-271, x=1, x=2, x=3, x=4, x=5, x=6, x=7, x=8, x=9, x=10, x=11, x=12, x=13, x=14, x=15, x=16, x=17, x=18, x=19, x=20, x=21, x=22, x=23, x=24, x=25, x=26, x=27, x=28, x=29, x=30, x=40, x=50, x=60, x=70, x=80, x=90, x=100, x=110, x=125, x=150, x=175, x=200, x=225, x=250, or x=271), provided that the TREM has one or both of the following properties: no more than 15% of the residues are N; or no more than 20 residues are absent.

[0789] In an embodiment, a TREM disclosed herein comprises the sequence of Formula II HIS (SEQ ID NO: 587),
[0790] R₀-R₁-R₂-R₃-R₄-R₅-R₆-R₇-R₈-R₉-R₁₀-R₁₁-R₁₂-R₁₃-R₁₄-R₁₅-R₁₆-R₁₇-R₁₈-R₁₉-R₂₀-R₂₁-R₂₂-R₂₃-R₂₄-R₂₅-R₂₆-R₂₇-R₂₈-R₂₉-R₃₀-R₃₁-R₃₂-R₃₃-R₃₄-R₃₅-R₃₆-R₃₇-R₃₈-R₃₉-R₄₀-R₄₁-R₄₂-R₄₃- R₄₄-R₄₅-R₄₆-[R₄₇]ₓ-R₄₈-R₄₉-R₅₀-R₅₁-R₅₂-R₅₃-R₅₄-R₅₅-R₅₆-R₅₇-R₅₈-R₅₉-R₆₀-R₆₁-R₆₂-R₆₃-R₆₄-R₆₅- R₆₆-R₆₇-R₆₈-R₆₉-R₇₀-R₇₁-R₇₂
   wherein R is a ribonucleotide residue and the consensus for His is:
[0791] R₀, R₁₇, R₁₈, R₂₃=are absent;
[0792] R₇, R₁₂, R₁₄, R₂₄, R₂₇, R₄₅, R₅₇, R₅₈, R₆₃, R₆₇, R₇₂=are independently A or absent;
[0793] R₃=A, C, U or absent;
[0794] R₄, R₄₃, R₅₆, R₇₀=are independently A, G or absent;
[0795] R₄₉=A, U or absent;
[0796] R₂, R₂₈, R₃₀, R₄₁, R₄₂, R₄₄, R₄₈, R₅₅, R₆₀, R₆₆, R₇₁=are independently C or absent;
[0797] R₂₅=C, G or absent;
[0798] R₉=C, G, U or absent;
[0799] R₈, R₁₃, R₂₆, R₃₃, R₃₅, R₅₀, R₅₃, R₆₁, R₆₈=are independently C, U or absent;
[0800] R₁, R₆, R₁₀, R₁₅, R₁₉, R₂₀, R₃₂, R₃₄, R₃₇, R₃₉, R₄₀, R₄₆, R₅₁, R₅₂, R₆₂, R₆₄, R₆₉=are independently G or absent;
[0801] R₁₆=G, U or absent;
[0802] R₅, R₁₁, R₂₁, R₂₂, R₂₉, R₃₁, R₃₆, R₃₈, R₅₄, R₅₉, R₆₅=are independently U or absent;
[0803] [R₄₇]ₓ=N or absent;
[0804] wherein, e.g., x=1-271 (e.g., x=1-250, x=1-225, x=1-200, x=1-175, x=1-150, x=1-125, x=1-100, x=1-75, x=1-50, x=1-40, x=1-30, x=1-29, x=1-28, x=1-27, x=1-26, x=1-25, x=1-24, x=1-23, x=1-22, x=1-21, x=1-20, x=1-19, x=1-18, x=1-17, x=1-16, x=1-15, x=1-14, x=1-13, x=1-12, x=1-11, x=1-10, x=10-271, x=20-271, x=30-271, x=40-271, x=50-271, x=60-271, x=70-271, x=80-271, x=100-271, x=125-271, x=150-271, x=175-271, x=200-271, x=225-271, x=1, x=2, x=3, x=4, x=5, x=6, x=7, x=8, x=9, x=10, x=11, x=12, x=13, x=14, x=15, x=16, x=17, x=18, x=19, x=20, x=21, x=22, x=23, x=24, x=25, x=26, x=27, x=28, x=29, x=30, x=40, x=50, x=60, x=70, x=80, x=90, x=100, x=110, x=125, x=150, x=175, x=200, x=225, x=250, or x=271), provided that the TREM has one or both of the following properties: no more than 15% of the residues are N; or no more than 20 residues are absent.

[0805] In an embodiment, a TREM disclosed herein comprises the sequence of Formula III HIS (SEQ ID NO: 588),
[0806] R₀-R₁-R₂-R₃-R₄-R₅-R₆-R₇-R₈-R₉-R₁₀-R₁₁-R₁₂-R₁₃-R₁₄-R₁₅-R₁₆-R₁₇-R₁₈-R₁₉-R₂₀-R₂₁-R₂₂-R₂₃-R₂₄-R₂₅-R₂₆-R₂₇-R₂₈-R₂₉-R₃₀-R₃₁-R₃₂-R₃₃-R₃₄-R₃₅-R₃₆-R₃₇-R₃₈-R₃₉-R₄₀-R₄₁-R₄₂-R₄₃- R₄₄-R₄₅-R₄₆-[R₄₇]ₓ-R₄₈-R₄₉-R₅₀-R₅₁-R₅₂-R₅₃-R₅₄-R₅₅-R₅₆-R₅₇-R₅₈-R₅₉-R₆₀-R₆₁-R₆₂-R₆₃-R₆₄-R₆₅- R₆₆-R₆₇-R₆₈-R₆₉-R₇₀-R₇₁-R₇₂
   wherein R is a ribonucleotide residue and the consensus for His is:
[0807] R₀, R₁₇, R₁₈, R₂₃=are absent
[0808] R₇, R₁₂, R₁₄, R₂₄, R₂₇, R₄₅, R₅₇, R₅₈, R₆₃, R₆₇, R₇₂=are independently A or absent;
[0809] R₃=A, C or absent;
[0810] R₄, R₄₃, R₅₆, R₇₀=are independently A, G or absent;
[0811] R₄₉=A, U or absent;
[0812] R₂, R₂₈, R₃₀, R₄₁, R₄₂, R₄₄, R₄₈, R₅₅, R₆₀, R₆₆, R₇₁=are independently C or absent;
[0813] R₈, R₀, R₂₆, R₃₃, R₃₅, R₅₀, R₆₁, R₆₈=are independently C, U or absent;
[0814] R₁, R₆, R₁₀, R₁₅, R₁₉, R₂₀, R₂₅, R₃₂, R₃₄, R₃₇, R₃₉, R₄₀, R₄₆, R₅₁, R₅₂, R₆₂, R₆₄, R₆₉=are independently G or absent;
[0815] R₅, R₁₁, R₁₃, R₁₆, R₂₁, R₂₂, R₂₉, R₃₁, R₃₆, R₃₈, R₅₃, R₅₄, R₅₉, R₆₅=are independently U or absent;
[0816] [R₄₇]ₓ=N or absent;
[0817] wherein, e.g., x=1-271 (e.g., x=1-250, x=1-225, x=1-200, x=1-175, x=1-150, x=1-125, x=1-100, x=1-75, x=1-50, x=1-40, x=1-30, x=1-29, x=1-28, x=1-27, x=1-26, x=1-25, x=1-24, x=1-23, x=1-22, x=1-21, x=1-20, x=1-19, x=1-18, x=1-17, x=1-16, x=1-15, x=1-14, x=1-13, 271, x=80-271, x=100-271, x=125-271, x=150-271, x=175-271, x=200-271, x=225-271, x=1, x=2, x=3, x=4, x=5, x=6, x=7, x=8, x=9, x=10, x=11, x=12, x=13, x=14, x=15, x=16, x=17, x=18, x=19, x=20, x=21, x=22, x=23, x=24, x=25, x=26, x=27, x=28, x=29, x=30, x=40, x=50, x=60, x=70, x=80, x=90, x=100, x=110, x=125, x=150, x=175, x=200, x=225, x=250, or x=271), provided that the TREM has one or both of the following properties: no more than 15% of the residues are N; or no more than 20 residues are absent.

### Isoleucine TREM Consensus Sequence

[0818] In an embodiment, a TREM disclosed herein comprises the sequence of Formula I _{ILE} (SEQ ID NO: 589),
[0819] R₀-R₁-R₂-R₃-R₄-R₅-R₆-R₇-R₈-R₉-R₁₀-R₁₁-R₁₂-R₁₃-R₁₄-R₁₅-R₁₆-R₁₇-R₁₈-R₁₉-R₂₀-R₂₁-R₂₂-R₂₃-R₂₄-R₂₅-R₂₆-R₂₇-R₂₈-R₂₉-R₃₀-R₃₁-R₃₂-R₃₃-R₃₄-R₃₅-R₃₆-R₃₇-R₃₈-R₃₉-R₄₀-R₄₁-R₄₂-R₄₃- R₄₄-R₄₅-R₄₆-[R₄₇]ₓ-R₄₈-R₄₉-R₅₀-R₅₁-R₅₂-R₅₃-R₅₄-R₅₅-R₅₆-R₅₇-R₅₈-R₅₉-R₆₀-R₆₁-R₆₂-R₆₃-R₆₄-R₆₅- R₆₆-R₆₇-R₆₈-R₆₉-R₇₀-R₇₁-R₇₂
   wherein R is a ribonucleotide residue and the consensus for Ile is:
[0820] R₂₃=absent;
[0821] R₃₈, R₄₁, R₅₇, R₇₂=are independently A or absent;
[0822] R₁, R₂₆=are independently A, C, G or absent;
[0823] R₀, R₃, R₄, R₆, R₁₆, R₃₁, R₃₂, R₃₄, R₃₇, R₄₂, R₄₃, R₄₄, R₄₅, R₄₆, R₄₈, R₄₉, R₅₀, R₅₈, R₅₉, R₆₂, R₆₃, R₆₄, R₆₆, R₆₇, R₆₈, R₆₉=are independently N or absent;
[0824] R₂₂, R₆₁, R₆₅=are independently A, C, U or absent;
[0825] R₉, R₁₄, R₁₅, R₂₄, R₂₇, R₄₀=are independently A, G or absent;
[0826] R₇, R₂₅, R₂₉, R₅₁, R₅₆=are independently A, G, U or absent;
[0827] R₁₈, R₅₄=are independently A, U or absent;
[0828] R₆₀=C or absent;
[0829] R₂, R₅₂, R₇₀=are independently C, G or absent;
[0830] R₅, R₁₂, R₂₁, R₃₀, R₃₃, R₇₁=are independently C, G, U or absent;
[0831] R₁₁, R₁₃, R₁₇, R₂₈, R₃₅, R₅₃, R₅₅=are independently C, U or absent;
[0832] R₁₀, R₁₉, R₂₀=are independently G or absent;
[0833] R₈, R₃₆, R₃₉=are independently U or absent;
[0834] [R₄₇]ₓ=N or absent;
[0835] wherein, e.g., x=1-271 (e.g., x=1-250, x=1-225, x=1-200, x=1-175, x=1-150, x=1-125, x=1-100, x=1-75, x=1-50, x=1-40, x=1-30, x=1-29, x=1-28, x=1-27, x=1-26, x=1-25, x=1-24, x=1-23, x=1-22, x=1-21, x=1-20, x=1-19, x=1-18, x=1-17, x=1-16, x=1-15, x=1-14, x=1-13, x=1-12, x=1-11, x=1-10, x=10-271, x=20-271, x=30-271, x=40-271, x=50-271, x=60-271, x=70-271, x=80-271, x=100-271, x=125-271, x=150-271, x=175-271, x=200-271, x=225-271, x=1, x=2, x=3, x=4, x=5, x=6, x=7, x=8, x=9, x=10, x=11, x=12, x=13, x=14, x=15, x=16, x=17, x=18, x=19, x=20, x=21, x=22, x=23, x=24, x=25, x=26, x=27, x=28, x=29, x=30, x=40, x=50, x=60, x=70, x=80, x=90, x=100, x=110, x=125, x=150, x=175, x=200, x=225, x=250, or x=271), provided that the TREM has one or both of the following properties: no more than 15% of the residues are N; or no more than 20 residues are absent.

[0836] In an embodiment, a TREM disclosed herein comprises the sequence of Formula II ILE (SEQ ID NO: 590),
[0837] R₀-R₁-R₂-R₃-R₄-R₅-R₆-R₇-R₈-R₉-R₁₀-R₁₁-R₁₂-R₁₃-R₁₄-R₁₅-R₁₆-R₁₇-R₁₈-R₁₉-R₂₀-R₂₁-R₂₂-R₂₃-R₂₄-R₂₅-R₂₆-R₂₇-R₂₈-R₂₉-R₃₀-R₃₁-R₃₂-R₃₃-R₃₄-R₃₅-R₃₆-R₃₇-R₃₈-R₃₉-R₄₀-R₄₁-R₄₂-R₄₃- R₄₄-R₄₅-R₄₆-[R₄₇]ₓ-R₄₈-R₄₉-R₅₀-R₅₁-R₅₂-R₅₃-R₅₄-R₅₅-R₅₆-R₅₇-R₅₈-R₅₉-R₆₀-R₆₁-R₆₂-R₆₃-R₆₄-R₆₅- R₆₆-R₆₇-R₆₈-R₆₉-R₇₀-R₇₁-R₇₂
   wherein R is a ribonucleotide residue and the consensus for Ile is:
[0838] R₀, R₁₈, R₂₃=are absent
[0839] R₂₄, R₃₈, R₄₀, R₄₁, R₅₇, R₇₂=are independently A or absent;
[0840] R₂₆, R₆₅=are independently A, C or absent;
[0841] R₅₈, R₅₉, R₆₇=are independently N or absent;
[0842] R₂₂=A, C, U or absent;
[0843] R₆, R₉, R₁₄, R₁₅, R₂₉, R₃₄, R₄₃, R₄₆, R₄₈, R₅₀, R₅₁, R₆₃, R₆₉=are independently A, G or absent;
[0844] R₃₇, R₅₆=are independently A, G, U or absent;
[0845] R₅₄=A, U or absent;
[0846] R₂₈, R₃₅, R₆₀, R₆₂, R₇₁=are independently C or absent;
[0847] R₂, R₅₂, R₇₀=are independently C, G or absent;
[0848] R₅=C, G, U or absent;
[0849] R₃, R₄, R₁₁, R₁₃, R₁₇, R₂₁, R₃₀, R₄₂, R₄₄, R₄₅, R₄₉, R₅₃, R₅₅, R₆₁, R₆₄, R₆₆=are independently C, U or absent;
[0850] R₁, R₁₀, R₁₉, R₂₀, R₂₅, R₂₇, R₃₁, R₆₈=are independently G or absent;
[0851] R₇, R₁₂, R₃₂=are independently G, U or absent;
[0852] R₈, R₁₆, R₃₃, R₃₆, R₃₉=are independently U or absent;
[0853] [R₄₇]ₓ=N or absent;
[0854] wherein, e.g., x=1-271 (e.g., x=1-250, x=1-225, x=1-200, x=1-175, x=1-150, x=1-125, x=1-100, x=1-75, x=1-50, x=1-40, x=1-30, x=1-29, x=1-28, x=1-27, x=1-26, x=1-25, x=1-24, x=1-23, x=1-22, x=1-21, x=1-20, x=1-19, x=1-18, x=1-17, x=1-16, x=1-15, x=1-14, x=1-13, x=1-12, x=1-11, x=1-10, x=10-271, x=20-271, x=30-271, x=40-271, x=50-271, x=60-271, x=70-271, x=80-271, x=100-271, x=125-271, x=150-271, x=175-271, x=200-271, x=225-271, x=1, x=2, x=3, x=4, x=5, x=6, x=7, x=8, x=9, x=10, x=11, x=12, x=13, x=14, x=15, x=16, x=17, x=18, x=19, x=20, x=21, x=22, x=23, x=24, x=25, x=26, x=27, x=28, x=29, x=30, x=40, x=50, x=60, x=70, x=80, x=90, x=100, x=110, x=125, x=150, x=175, x=200, x=225, x=250, or x=271), provided that the TREM has one or both of the following properties: no more than 15% of the residues are N; or no more than 20 residues are absent.

[0855] In an embodiment, a TREM disclosed herein comprises the sequence of Formula III _{ILE} (SEQ ID NO: 591),
[0856] R₀-R₁-R₂-R₃-R₄-R₅-R₆-R₇-R₈-R₉-R₁₀-R₁₁-R₁₂-R₁₃-R₁₄-R₁₅-R₁₆-R₁₇-R₁₈-R₁₉-R₂₀-R₂₁-R₂₂-R₂₃-R₂₄-R₂₅-R₂₆-R₂₇-R₂₈-R₂₉-R₃₀-R₃₁-R₃₂-R₃₃-R₃₄-R₃₅-R₃₆-R₃₇-R₃₈-R₃₉-R₄₀-R₄₁-R₄₂-R₄₃- R₄₄-R₄₅-R₄₆-[R₄₇]ₓ-R₄₈-R₄₉-R₅₀-R₅₁-R₅₂-R₅₃-R₅₄-R₅₅-R₅₆-R₅₇-R₅₈-R₅₉-R₆₀-R₆₁-R₆₂-R₆₃-R₆₄-R₆₅- R₆₆-R₆₇-R₆₈-R₆₉-R₇₀-R₇₁-R₇₂
   wherein R is a ribonucleotide residue and the consensus for Ile is:
[0857] R₀, R₁₈, R₂₃=are absent
[0858] R₁₄, R₂₄, R₃₈, R₄₀, R₄₁, R₅₇, R₇₂=are independently A or absent;
[0859] R₂₆, R₆₅=are independently A, C or absent;
[0860] R₂₂, R₅₉=are independently A, C, U or absent;
[0861] R₀, R₉, R₁₅, R₃₄, R₄₃, R₄₆, R₅₁, R₅₆, R₆₃, R₆₉=are independently A, G or absent;
[0862] R₃₇=A, G, U or absent;
[0863] R₁₃, R₂₈, R₃₅, R₄₄, R₅₅, R₆₀, R₆₂, R₇₁=are independently C or absent;
[0864] R₂, R₅, R₇₀=are independently C, G or absent;
[0865] R₅₈, R₆₇=are independently C, G, U or absent;
[0866] R₃, R₄, R₁₁, R₁₇, R₂₁, R₃₀, R₄₂, R₄₅, R₄₉, R₅₃, R₆₁, R₆₄, R₆₆=are independently C, U or absent;
[0867] R₁, R₁₀, R₁₉, R₂₀, R₂₅, R₂₇, R₂₉, R₃₁, R₃₂, R₄₈, R₅₀, R₅₂, R₆₈=are independently G or absent;
[0868] R₇, R₁₂=are independently G, U or absent;
[0869] R₈, R₁₆, R₃₃, R₃₆, R₃₉, R₅₄=are independently U or absent;
[0870] [R₄₇]ₓ=N or absent;
[0871] wherein, e.g., x=1-271 (e.g., x=1-250, x=1-225, x=1-200, x=1-175, x=1-150, x=1-125, x=1-100, x=1-75, x=1-50, x=1-40, x=1-30, x=1-29, x=1-28, x=1-27, x=1-26, x=1-25, x=1-24, x=1-23, x=1-22, x=1-21, x=1-20, x=1-19, x=1-18, x=1-17, x=1-16, x=1-15, x=1-14, x=1-13, x=1-12, x=1-11, x=1-10, x=10-271, x=20-271, x=30-271, x=40-271, x=50-271, x=60-271, x=70-271, x=80-271, x=100-271, x=125-271, x=150-271, x=175-271, x=200-271, x=225-271, x=1, x=2, x=3, x=4, x=5, x=6, x=7, x=8, x=9, x=10, x=11, x=12, x=13, x=14, x=15, x=16, x=17, x=18, x=19, x=20, x=21, x=22, x=23, x=24, x=25, x=26, x=27, x=28, x=29, x=30, x=40, x=50, x=60, x=70, x=80, x=90, x=100, x=110, x=125, x=150, x=175, x=200, x=225, x=250, or x=271), provided that the TREM has one or both of the following properties: no more than 15% of the residues are N; or no more than 20 residues are absent.

### Methionine TREM Consensus Sequence

[0872] In an embodiment, a TREM disclosed herein comprises the sequence of Formula I _{MET} (SEQ ID NO: 592),
[0873] R₀-R₁-R₂-R₃-R₄-R₅-R₆-R₇-R₈-R₉-R₁₀-R₁₁-R₁₂-R₁₃-R₁₄-R₁₅-R₁₆-R₁₇-R₁₈-R₁₉-R₂₀-R₂₁-R₂₂-R₂₃-R₂₄-R₂₅-R₂₆-R₂₇-R₂₈-R₂₉-R₃₀-R₃₁-R₃₂-R₃₃-R₃₄-R₃₅-R₃₆-R₃₇-R₃₈-R₃₉-R₄₀-R₄₁-R₄₂-R₄₃- R₄₄-R₄₅-R₄₆-[R₄₇]ₓ-R₄₈-R₄₉-R₅₀-R₅₁-R₅₂-R₅₃-R₅₄-R₅₅-R₅₆-R₅₇-R₅₈-R₅₉-R₆₀-R₆₁-R₆₂-R₆₃-R₆₄-R₆₅- R₆₆-R₆₇-R₆₈-R₆₉-R₇₀-R₇₁-R₇₂
   wherein R is a ribonucleotide residue and the consensus for Met is:
[0874] R₀, R₂₃=are absent;
[0875] R₁₄, R₃₈, R₄₀, R₅₇=are independently A or absent;
[0876] R₆₀=A, C or absent;
[0877] R₃₃, R₄₈, R₇₀=are independently A, C, G or absent;
[0878] R₁, R₃, R₄, R₅, R₆, R₁₁, R₁₂, R₁₆, R₁₇, R₂₁, R₂₂, R₂₆, R₂₇, R₂₉, R₃₀, R₃₁, R₃₂, R₄₂, R₄₄, R₄₅, R₄₆, R₄₉, R₅₀, R₅₈, R₆₂, R₆₃, R₆₆, R₆₇, R₆₈, R₆₉, R₇₁=are independently N or absent;
[0879] R₁₈, R₃₅, R₄₁, R₅₉, R₆₅=are independently A, C, U or absent;
[0880] R₉, R₁₅, R₅₁=are independently A, G or absent;
[0881] R₇, R₂₄, R₂₅, R₃₄, R₅₃, R₅₆=are independently A, G, U or absent;
[0882] R₇₂=A, U or absent;
[0883] R₃₇=C or absent;
[0884] R₁₀, R₅₅=are independently C, G or absent;
[0885] R₂, R₁₃, R₂₈, R₄₃, R₆₄=are independently C, G, U or absent;
[0886] R₃₆, R₆₁=are independently C, U or absent;
[0887] R₁₉, R₂₀, R₅₂=are independently G or absent;
[0888] R₈, R₃₉, R₅₄=are independently U or absent;
[0889] [R₄₇]ₓ=N or absent;
[0890] wherein, e.g., x=1-271 (e.g., x=1-250, x=1-225, x=1-200, x=1-175, x=1-150, x=1-125, x=1-100, x=1-75, x=1-50, x=1-40, x=1-30, x=1-29, x=1-28, x=1-27, x=1-26, x=1-25, x=1-24, x=1-23, x=1-22, x=1-21, x=1-20, x=1-19, x=1-18, x=1-17, x=1-16, x=1-15, x=1-14, x=1-13, x=1-12, x=1-11, x=1-10, x=10-271, x=20-271, x=30-271, x=40-271, x=50-271, x=60-271, x=70-271, x=80-271, x=100-271, x=125-271, x=150-271, x=175-271, x=200-271, x=225-271, x=1, x=2, x=3, x=4, x=5, x=6, x=7, x=8, x=9, x=10, x=11, x=12, x=13, x=14, x=15, x=16, x=17, x=18, x=19, x=20, x=21, x=22, x=23, x=24, x=25, x=26, x=27, x=28, x=29, x=30, x=40, x=50, x=60, x=70, x=80, x=90, x=100, x=110, x=125, x=150, x=175, x=200, x=225, x=250, or x=271), provided that the TREM has one or both of the following properties: no more than 15% of the residues are N; or no more than 20 residues are absent.

[0891] In an embodiment, a TREM disclosed herein comprises the sequence of Formula II MET (SEQ ID NO: 593),
[0892] R₀-R₁-R₂-R₃-R₄-R₅-R₆-R₇-R₈-R₉-R₁₀-R₁₁-R₁₂-R₁₃-R₁₄-R₁₅-R₁₆-R₁₇-R₁₈-R₁₉-R₂₀-R₂₁-R₂₂-R₂₃-R₂₄-R₂₅-R₂₆-R₂₇-R₂₈-R₂₉-R₃₀-R₃₁-R₃₂-R₃₃-R₃₄-R₃₅-R₃₆-R₃₇-R₃₈-R₃₉-R₄₀-R₄₁-R₄₂-R₄₃- R₄₄-R₄₅-R₄₆-[R₄₇]ₓ-R₄₈-R₄₉-R₅₀-R₅₁-R₅₂-R₅₃-R₅₄-R₅₅-R₅₆-R₅₇-R₅₈-R₅₉-R₆₀-R₆₁-R₆₂-R₆₃-R₆₄-R₆₅- R₆₆-R₆₇-R₆₈-R₆₉-R₇₀-R₇₁-R₇₂
   wherein R is a ribonucleotide residue and the consensus for Met is:
[0893] R₀, R₁₈, R₂₂, R₂₃=are absent
[0894] R₁₄, R₂₄, R₃₈, R₄₀, R₄₁, R₅₇, R₇₂=are independently A or absent;
[0895] R₅₉, R₆₀, R₆₂, R₆₅=are independently A, C or absent;
[0896] R₆, R₄₅, R₆₇=are independently A, C, G or absent;
[0897] R₄=N or absent;
[0898] R₂₁, R₄₂=are independently A, C, U or absent;
[0899] R₁, R₉, R₂₇, R₂₉, R₃₂, R₄₆, R₅₁=are independently A, G or absent;
[0900] R₁₇, R₄₉, R₅₃, R₅₆, R₅₈=are independently A, G, U or absent;
[0901] R₆₃=A, U or absent;
[0902] R₃, R₁₃, R₃₇=are independently C or absent;
[0903] R₄₈, R₅₅, R₆₄, R₇₀=are independently C, G or absent;
[0904] R₂, R₅, R₆₆, R₆₈=are independently C, G, U or absent;
[0905] R₁₁, R₁₆, R₂₆, R₂₈, R₃₀, R₃₁, R₃₅, R₃₆, R₄₃, R₄₄, R₆₁, R₇₁=are independently C, U or absent;
[0906] R₁₀, R₁₂, R₁₅, R₁₉, R₂₀, R₂₅, R₃₃, R₅₂, R₆₉=are independently G or absent;
[0907] R₇, R₃₄, R₅₀=are independently G, U or absent;
[0908] R₈, R₃₉, R₅₄=are independently U or absent;
[0909] [R₄₇]ₓ=N or absent;
[0910] wherein, e.g., x=1-271 (e.g., x=1-250, x=1-225, x=1-200, x=1-175, x=1-150, x=1-125, x=1-100, x=1-75, x=1-50, x=1-40, x=1-30, x=1-29, x=1-28, x=1-27, x=1-26, x=1-25, x=1-24, x=1-23, x=1-22, x=1-21, x=1-20, x=1-19, x=1-18, x=1-17, x=1-16, x=1-15, x=1-14, x=1-13, x=1-12, x=1-11, x=1-10, x=10-271, x=20-271, x=30-271, x=40-271, x=50-271, x=60-271, x=70-271, x=80-271, x=100-271, x=125-271, x=150-271, x=175-271, x=200-271, x=225-271, x=1, x=2, x=3, x=4, x=5, x=6, x=7, x=8, x=9, x=10, x=11, x=12, x=13, x=14, x=15, x=16, x=17, x=18, x=19, x=20, x=21, x=22, x=23, x=24, x=25, x=26, x=27, x=28, x=29, x=30, x=40, x=50, x=60, x=70, x=80, x=90, x=100, x=110, x=125, x=150, x=175, x=200, x=225, x=250, or x=271), provided that the TREM has one or both of the following properties: no more than 15% of the residues arc N; or no more than 20 residues arc absent.

[0911] In an embodiment, a TREM disclosed herein comprises the sequence of Formula III MET (SEQ ID NO: 594),
[0912] R₀-R₁-R₂-R₃-R₄-R₅-R₆-R₇-R₈-R₉-R₁₀-R₁₁-R₁₂-R₁₃-R₁₄-R₁₅-R₁₆-R₁₇-R₁₈-R₁₉-R₂₀-R₂₁-R₂₂-R₂₃-R₂₄-R₂₅-R₂₆-R₂₇-R₂₈-R₂₉-R₃₀-R₃₁-R₃₂-R₃₃-R₃₄-R₃₅-R₃₆-R₃₇-R₃₈-R₃₉-R₄₀-R₄₁-R₄₂-R₄₃- R₄₄-R₄₅-R₄₆-[R₄₇]ₓ-R₄₈-R₄₉-R₅₀-R₅₁-R₅₂-R₅₃-R₅₄-R₅₅-R₅₆-R₅₇-R₅₈-R₅₉-R₆₀-R₆₁-R₆₂-R₆₃-R₆₄-R₆₅- R₆₆-R₆₇-R₆₈-R₆₉-R₇₀-R₇₁-R₇₂
   wherein R is a ribonucleotide residue and the consensus for Met is:
[0913] R₀, R₁₈, R₂₂, R₂₃=are absent
[0914] R₁₄, R₂₄, R₃₈, R₄₀, R₄₁, R₅₇, R₇₂=are independently A or absent;
[0915] R₅₉, R₆₂, R₆₅=are independently A, C or absent;
[0916] R₆, R₆₇=are independently A, C, G or absent;
[0917] R₄, R₂₁=are independently A, C, U or absent;
[0918] R₁, R₉, R₂₇, R₂₉, R₃₂, R₄₅, R₄₆, R₅₁=are independently A, G or absent;
[0919] R₁₇, R₅₆, R₅₈=are independently A, G, U or absent;
[0920] R₄₉, R₅₃, R₆₃=are independently A, U or absent;
[0921] R₃, R₁₃, R₂₆, R₃₇, R₄₃, R₆₀=are independently C or absent;
[0922] R₂, R₄₈, R₅₅, R₆₄, R₇₀=are independently C, G or absent;
[0923] R₅, R₆₆=are independently C, G, U or absent;
[0924] R₁₁, R₁₆, R₂₈, R₃₀, R₃₁, R₃₅, R₃₆, R₄₂, R₄₄, R₆₁, R₇₁=are independently C, U or absent;
[0925] R₁₀, R₁₂, R₁₅, R₁₉, R₂₀, R₂₅, R₃₃, R₅₂, R₆₉=are independently G or absent;
[0926] R₇, R₃₄, R₅₀, R₆₈=are independently G, U or absent;
[0927] R₈, R₃₉, R₅₄=are independently U or absent;
[0928] [R₄₇]ₓ=N or absent;
[0929] wherein, e.g., x=1-271 (e.g., x=1-250, x=1-225, x=1-200, x=1-175, x=1-150, x=1-125, x=1-100, x=1-75, x=1-50, x=1-40, x=1-30, x=1-29, x=1-28, x=1-27, x=1-26, x=1-25, x=1-24, x=1-23, x=1-22, x=1-21, x=1-20, x=1-19, x=1-18, x=1-17, x=1-16, x=1-15, x=1-14, x=1-13, x=1-12, x=1-11, x=1-10, x=10-271, x=20-271, x=30-271, x=40-271, x=50-271, x=60-271, x=70-271, x=80-271, x=100-271, x=125-271, x=150-271, x=175-271, x=200-271, x=225-271, x=1, x=2, x=3, x=4, x=5, x=6, x=7, x=8, x=9, x=10, x=11, x=12, x=13, x=14, x=15, x=16, x=17, x=18, x=19, x=20, x=21, x=22, x=23, x=24, x=25, x=26, x=27, x=28, x=29, x=30, x=40, x=50, x=60, x=70, x=80, x=90, x=100, x=110, x=125, x=150, x=175, x=200, x=225, x=250, or x=271), provided that the TREM has one or both of the following properties: no more than 15% of the residues are N; or no more than 20 residues are absent.

### Leucine TREM Consensus Sequence

[0930] In an embodiment, a TREM disclosed herein comprises the sequence of Formula I _{LEU} (SEQ ID NO: 595),
[0931] R₀-R₁-R₂-R₃-R₄-R₅-R₆-R₇-R₈-R₉-R₁₀-R₁₁-R₁₂-R₁₃-R₁₄-R₁₅-R₁₆-R₁₇-R₁₈-R₁₉-R₂₀-R₂₁-R₂₂-R₂₃-R₂₄-R₂₅-R₂₆-R₂₇-R₂₈-R₂₉-R₃₀-R₃₁-R₃₂-R₃₃-R₃₄-R₃₅-R₃₆-R₃₇-R₃₈-R₃₉-R₄₀-R₄₁-R₄₂-R₄₃- R₄₄-R₄₅-R₄₆-[R₄₇]ₓ-R₄₈-R₄₉-R₅₀-R₅₁-R₅₂-R₅₃-R₅₄-R₅₅-R₅₆-R₅₇-R₅₈-R₅₉-R₆₀-R₆₁-R₆₂-R₆₃-R₆₄-R₆₅- R₆₆-R₆₇-R₆₈-R₆₉-R₇₀-R₇₁-R₇₂
   wherein R is a ribonucleotide residue and the consensus for Leu is:
[0932] R₀=absent;
[0933] R₃₈, R₅₇=are independently A or absent;
[0934] R₆₀=A, C or absent;
[0935] R₁, R₁₃, R₂₇, R₄₈, R₅₁, R₅₆=are independently A, C, G or absent;
[0936] R₂, R₃, R₄, R₅, R₆, R₇, R₀, R₁₀, R₁₁, R₁₂, R₁₆, R₂₃, R₂₆, R₂₈, R₂₉, R₃₀, R₃₁, R₃₂, R₃₃, R₃₄, R₃₇, R₄₁, R₄₂, R₄₃, R₄₄, R₄₅, R₄₆, R₄₉, R₅₀, R₅₈, R₆₂, R₆₃, R₆₅, R₆₆, R₆₇, R₆₈, R₆₉, R₇₀=are independently N or absent;
[0937] R₁₇, R₁₈, R₂₁, R₂₂, R₂₅, R₃₅, R₅₅=are independently A, C, U or absent;
[0938] R₁₄, R₁₅, R₃₉, R₇₂=are independently A, G or absent;
[0939] R₂₄, R₄₀=are independently A, G, U or absent;
[0940] R₅₂, R₆₁, R₆₄, R₇₁=are independently C, G, U or absent;
[0941] R₃₆, R₅₃, R₅₉=are independently C, U or absent;
[0942] R₁₉=G or absent;
[0943] R₂₀=G, U or absent;
[0944] R₈, R₅₄=are independently U or absent;
[0945] [R₄₇]ₓ=N or absent;
[0946] wherein, e.g., x=1-271 (e.g., x=1-250, x=1-225, x=1-200, x=1-175, x=1-150, x=1-125, x=1-100, x=1-75, x=1-50, x=1-40, x=1-30, x=1-29, x=1-28, x=1-27, x=1-26, x=1-25, x=1-24, x=1-23, x=1-22, x=1-21, x=1-20, x=1-19, x=1-18, x=1-17, x=1-16, x=1-15, x=1-14, x=1-13, x=1-12, x=1-11, x=1-10, x=10-271, x=20-271, x=30-271, x=40-271, x=50-271, x=60-271, x=70-271, x=80-271, x=100-271, x=125-271, x=150-271, x=175-271, x=200-271, x=225-271, x=1, x=2, x=3, x=4, x=5, x=6, x=7, x=8, x=9, x=10, x=11, x=12, x=13, x=14, x=15, x=16, x=17, x=18, x=19, x=20, x=21, x=22, x=23, x=24, x=25, x=26, x=27, x=28, x=29, x=30, x=40, x=50, x=60, x=70, x=80, x=90, x=100, x=110, x=125, x=150, x=175, x=200, x=225, x=250, or x=271), provided that the TREM has one or both of the following properties: no more than 15% of the residues are N; or no more than 20 residues are absent.

[0947] In an embodiment, a TREM disclosed herein comprises the sequence of Formula II LEU (SEQ ID NO: 596),
[0948] R₀-R₁-R₂-R₃-R₄-R₅-R₆-R₇-R₈-R₉-R₁₀-R₁₁-R₁₂-R₁₃-R₁₄-R₁₅-R₁₆-R₁₇-R₁₈-R₁₉-R₂₀-R₂₁-R₂₂-R₂₃-R₂₄-R₂₅-R₂₆-R₂₇-R₂₈-R₂₉-R₃₀-R₃₁-R₃₂-R₃₃-R₃₄-R₃₅-R₃₆-R₃₇-R₃₈-R₃₉-R₄₀-R₄₁-R₄₂-R₄₃- R₄₄-R₄₅-R₄₆-[R₄₇]ₓ-R₄₈-R₄₉-R₅₀-R₅₁-R₅₂-R₅₃-R₅₄-R₅₅-R₅₆-R₅₇-R₅₈-R₅₉-R₆₀-R₆₁-R₆₂-R₆₃-R₆₄-R₆₅- R₆₆-R₆₇-R₆₈-R₆₉-R₇₀-R₇₁-R₇₂
   wherein R is a ribonucleotide residue and the consensus for Leu is:
[0949] R₀=absent
[0950] R₃₈, R₅₇, R₇₂=are independently A or absent;
[0951] R₆₀=A, C or absent;
[0952] R₄, R₅, R₄₈, R₅₀, R₅₆, R₆₉=are independently A, C, G or absent;
[0953] R₆, R₃₃, R₄₁, R₄₃, R₄₆, R₄₉, R₅₈, R₆₃, R₆₆, R₇₀=are independently N or absent;
[0954] R₁₁, R₁₂, R₁₇, R₂₁, R₂₂, R₂₈, R₃₁, R₃₇, R₄₄, R₅₅=are independently A, C, U or absent;
[0955] R₁, R₉, R₁₄, R₁₅, R₂₄, R₂₇, R₃₄, R₃₉=are independently A, G or absent;
[0956] R₇, R₂₉, R₃₂, R₄₀, R₄₅=are independently A, G, U or absent;
[0957] R₂₅=A, U or absent;
[0958] R₁₃=C, G or absent;
[0959] R₂, R₃, R₁₆, R₂₆, R₃₀, R₅₂, R₆₂, R₆₄, R₆₅, R₆₇, R₆₈=are independently C, G, U or absent;
[0960] R₁₈, R₃₅, R₄₂, R₅₃, R₅₉, R₆₁, R₇₁=are independently C, U or absent;
[0961] R₁₉, R₅₁=are independently G or absent;
[0962] R₁₀, R₂₀=are independently G, U or absent;
[0963] R₈, R₂₃, R₃₆, R₅₄=are independently U or absent;
[0964] [R₄₇]ₓ=N or absent;
[0965] wherein, e.g., x=1-271 (e.g., x=1-250, x=1-225, x=1-200, x=1-175, x=1-150, x=1-125, x=1-100, x=1-75, x=1-50, x=1-40, x=1-30, x=1-29, x=1-28, x=1-27, x=1-26, x=1-25, x=1-24, x=1-23, x=1-22, x=1-21, x=1-20, x=1-19, x=1-18, x=1-17, x=1-16, x=1-15, x=1-14, x=1-13, x=1-12, x=1-11, x=1-10, x=10-271, x=20-271, x=30-271, x=40-271, x=50-271, x=60-271, x=70-271, x=80-271, x=100-271, x=125-271, x=150-271, x=175-271, x=200-271, x=225-271, x=1, x=2, x=3, x=4, x=5, x=6, x=7, x=8, x=9, x=10, x=11, x=12, x=13, x=14, x=15, x=16, x=17, x=18, x=19, x=20, x=21, x=22, x=23, x=24, x=25, x=26, x=27, x=28, x=29, x=30, x=40, x=50, x=60, x=70, x=80, x=90, x=100, x=110, x=125, x=150, x=175, x=200, x=225, x=250, or x=271), provided that the TREM has one or both of the following properties: no more than 15% of the residues are N; or no more than 20 residues are absent.

[0966] In an embodiment, a TREM disclosed herein comprises the sequence of Formula III LEU (SEQ ID NO: 597),
[0967] R₀-R₁-R₂-R₃-R₄-R₅-R₆-R₇-R₈-R₉-R₁₀-R₁₁-R₁₂-R₁₃-R₁₄-R₁₅-R₁₆-R₁₇-R₁₈-R₁₉-R₂₀-R₂₁-R₂₂-R₂₃-R₂₄-R₂₅-R₂₆-R₂₇-R₂₈-R₂₉-R₃₀-R₃₁-R₃₂-R₃₃-R₃₄-R₃₅-R₃₆-R₃₇-R₃₈-R₃₉-R₄₀-R₄₁-R₄₂-R₄₃- R₄₄-R₄₅-R₄₆-[R₄₇]ₓ-R₄₈-R₄₉-R₅₀-R₅₁-R₅₂-R₅₃-R₅₄-R₅₅-R₅₆-R₅₇-R₅₈-R₅₉-R₆₀-R₆₁-R₆₂-R₆₃-R₆₄-R₆₅- R₆₆-R₆₇-R₆₈-R₆₉-R₇₀-R₇₁-R₇₂
   wherein R is a ribonucleotide residue and the consensus for Leu is:
[0968] R₀=absent
[0969] R₃₈, R₅₇, R₇₂=are independently A or absent;
[0970] R₆₀=A, C or absent;
[0971] R₄, R₅, R₄₈, R₅₀, R₅₆, R₅₈, R₆₉=are independently A, C, G or absent;
[0972] R₆, R₃₃, R₄₃, R₄₆, R₄₉, R₆₃, R₆₆, R₇₀=are independently N or absent;
[0973] R₁₁, R₁₂, R₁₇, R₂₁, R₂₂, R₂₈, R₃₁, R₃₇, R₄₁, R₄₄, R₅₅=are independently A, C, U or absent;
[0974] R₁, R₉, R₁₄, R₁₅, R₂₄, R₂₇, R₃₄, R₃₉=are independently A, G or absent;
[0975] R₇, R₂₉, R₃₂, R₄₀, R₄₅=are independently A, G, U or absent;
[0976] R₂₅=A, U or absent;
[0977] R₁₃=C, G or absent;
[0978] R₂, R₃, R₁₆, R₃₀, R₅₂, R₆₂, R₆₄, R₆₇, R₆₈=are independently C, G, U or absent;
[0979] R₁₈, R₃₅, R₄₂, R₅₃, R₅₉, R₆₁, R₆₅, R₇₁=are independently C, U or absent;
[0980] R₁₉, R₅₁=are independently G or absent;
[0981] R₁₀, R₂₀, R₂₆=are independently G, U or absent;
[0982] R₈, R₂₃, R₃₆, R₅₄=are independently U or absent;
[0983] [R₄₇]ₓ=N or absent;
[0984] wherein, e.g., x=1-271 (e.g., x=1-250, x=1-225, x=1-200, x=1-175, x=1-150, x=1-125, x=1-100, x=1-75, x=1-50, x=1-40, x=1-30, x=1-29, x=1-28, x=1-27, x=1-26, x=1-25, x=1-24, x=1-23, x=1-22, x=1-21, x=1-20, x=1-19, x=1-18, x=1-17, x=1-16, x=1-15, x=1-14, x=1-13, x=1-12, x=1-11, x=1-10, x=10-271, x=20-271, x=30-271, x=40-271, x=50-271, x=60-271, x=70-271, x=80-271, x=100-271, x=125-271, x=150-271, x=175-271, x=200-271, x=225-271, x=1, x=2, x=3, x=4, x=5, x=6, x=7, x=8, x=9, x=10, x=11, x=12, x=13, x=14, x=15, x=16, x=17, x=18, x=19, x=20, x=21, x=22, x=23, x=24, x=25, x=26, x=27, x=28, x=29, x=30, x=40, x=50, x=60, x=70, x=80, x=90, x=100, x=110, x=125, x=150, x=175, x=200, x=225, x=250, or x=271), provided that the TREM has one or both of the following properties: no more than 15% of the residues are N; or no more than 20 residues are absent.

### Lysine TREM Consensus Sequence

[0985] In an embodiment, a TREM disclosed herein comprises the sequence of Formula I LYS (SEQ ID NO: 598),
[0986] R₀-R₁-R₂-R₃-R₄-R₅-R₆-R₇-R₈-R₉-R₁₀-R₁₁-R₁₂-R₁₃-R₁₄-R₁₅-R₁₆-R₁₇-R₁₈-R₁₉-R₂₀-R₂₁-R₂₂-R₂₃-R₂₄-R₂₅-R₂₆-R₂₇-R₂₈-R₂₉-R₃₀-R₃₁-R₃₂-R₃₃-R₃₄-R₃₅-R₃₆-R₃₇-R₃₈-R₃₉-R₄₀-R₄₁-R₄₂-R₄₃- R₄₄-R₄₅-R₄₆-[R₄₇]ₓ-R₄₈-R₄₉-R₅₀-R₅₁-R₅₂-R₅₃-R₅₄-R₅₅-R₅₆-R₅₇-R₅₈-R₅₉-R₆₀-R₆₁-R₆₂-R₆₃-R₆₄-R₆₅- R₆₆-R₆₇-R₆₈-R₆₉-R₇₀-R₇₁-R₇₂
   wherein R is a ribonucleotide residue and the consensus for Lys is:
[0987] R₀=absent
[0988] R₁₄=A or absent;
[0989] R₄₀, R₄₁=are independently A, C or absent;
[0990] R₃₄, R₄₃, R₅₁=are independently A, C, G or absent;
[0991] R₁, R₂, R₃, R₄, R₅, R₆, R₇, R₁₁, R₁₂, R₁₆, R₂₁, R₂₆, R₃₀, R₃₁, R₃₂, R₄₄, R₄₅, R₄₆, R₄₈, R₄₉, R₅₀, R₅₈, R₆₂, R₆₃, R₆₅, R₆₆, R₆₇, R₆₈, R₆₉, R₇₀=are independently N or absent;
[0992] R₁₃, R₁₇, R₅₉, R₇₁=are independently A, C, U or absent;
[0993] R₀, R₁₅, R₁₉, R₂₀, R₂₅, R₂₇, R₅₂, R₅₆=are independently A, G or absent;
[0994] R₂₄, R₂₉, R₇₂=are independently A, G, U or absent;
[0995] R₁₈, R₅₇=are independently A, U or absent;
[0996] R₁₀, R₃₃=are independently C, G or absent;
[0997] R₄₂, R₆₁, R₆₄=are independently C, G, U or absent;
[0998] R₂₈, R₃₅, R₃₆, R₃₇, R₅₃, R₅₅, R₆₀=are independently C, U or absent;
[0999] R₈, R₂₂, R₂₃, R₃₈, R₃₉, R₅₄=are independently U or absent;
[1000] [R₄₇]ₓ=N or absent;
[1001] wherein, e.g., x=1-271 (e.g., x=1-250, x=1-225, x=1-200, x=1-175, x=1-150, x=1-125, x=1-100, x=1-75, x=1-50, x=1-40, x=1-30, x=1-29, x=1-28, x=1-27, x=1-26, x=1-25, x=1-24, x=1-23, x=1-22, x=1-21, x=1-20, x=1-19, x=1-18, x=1-17, x=1-16, x=1-15, x=1-14, x=1-13, x=1-12, x=1-11, x=1-10, x=10-271, x=20-271, x=30-271, x=40-271, x=50-271, x=60-271, x=70-271, x-80-271, x=100-271, x=125-271, x=150-271, x=175-271, x=200-271, x=225-271, x=1, x=2, x=3, x=4, x=5, x=6, x=7, x=8, x=9, x=10, x=11, x=12, x=13, x=14, x=15, x=16, x=17, x=18, x=19, x=20, x=21, x=22, x=23, x=24, x=25, x=26, x=27, x=28, x=29, x=30, x=40, x=50, x=60, x=70, x=80, x=90, x=100, x=110, x=125, x=150, x=175, x=200, x=225, x=250, or x=271), provided that the TREM has one or both of the following properties: no more than 15% of the residues are N; or no more than 20 residues are absent.

[1002] In an embodiment, a TREM disclosed herein comprises the sequence of Formula II LYS (SEQ ID NO: 599),
[1003] R₀-R₁-R₂-R₃-R₄-R₅-R₆-R₇-R₈-R₉-R₁₀-R₁₁-R₁₂-R₁₃-R₁₄-R₁₅-R₁₆-R₁₇-R₁₈-R₁₉-R₂₀-R₂₁-R₂₂-R₂₃-R₂₄-R₂₅-R₂₆-R₂₇-R₂₈-R₂₉-R₃₀-R₃₁-R₃₂-R₃₃-R₃₄-R₃₅-R₃₆-R₃₇-R₃₈-R₃₉-R₄₀-R₄₁-R₄₂-R₄₃- R₄₄-R₄₅-R₄₆-[R₄₇]ₓ-R₄₈-R₄₉-R₅₀-R₅₁-R₅₂-R₅₃-R₅₄-R₅₅-R₅₆-R₅₇-R₅₈-R₅₉-R₆₀-R₆₁-R₆₂-R₆₃-R₆₄-R₆₅- R₆₆-R₆₇-R₆₈-R₆₉-R₇₀-R₇₁-R₇₂
   wherein R is a ribonucleotide residue and the consensus for Lys is:
[1004] R₀, R₁₈, R₂₃=are absent
[1005] R₁₄=A or absent;
[1006] R₄₀, R₄₁, R₄₃=are independently A, C or absent;
[1007] R₃, R₇=are independently A, C, G or absent;
[1008] R₁, R₆, R₁₁, R₃₁, R₄₅, R₄₈, R₄₉, R₆₃, R₆₅, R₆₆, R₆₈=are independently N or absent;
[1009] R₂, R₁₂, R₁₃, R₁₇, R₄₄, R₆₇, R₇₁=are independently A, C, U or absent;
[1010] R₉, R₁₅, R₁₉, R₂₀, R₂₅, R₂₇, R₃₄, R₅₀, R₅₂, R₅₆, R₇₀, R₇₂=are independently A, G or absent;
[1011] R₅, R₂₄, R₂₆, R₂₉, R₃₂, R₄₆, R₆₉=are independently A, G, U or absent;
[1012] R₅₇=A, U or absent;
[1013] R₁₀, R₆₁=are independently C, G or absent;
[1014] R₄, R₁₆, R₂₁, R₃₀, R₅₈, R₆₄=are independently C, G, U or absent;
[1015] R₂₈, R₃₅, R₃₆, R₃₇, R₄₂, R₅₃, R₅₅, R₅₉, R₆₀, R₆₂=are independently C, U or absent;
[1016] R₃₃, R₅₁=are independently G or absent;
[1017] R₈-G, U or absent;
[1018] R₂₂, R₃₈, R₃₉, R₅₄=are independently U or absent;
[1019] [R₄₇]ₓ=N or absent;
[1020] wherein, e.g., x=1-271 (e.g., x=1-250, x=1-225, x=1-200, x=1-175, x=1-150, x=1-125, x=1-100, x=1-75, x=1-50, x=1-40, x=1-30, x=1-29, x=1-28, x=1-27, x=1-26, x=1-25, x=1-24, x=1-23, x=1-22, x=1-21, x=1-20, x=1-19, x=1-18, x=1-17, x=1-16, x=1-15, x=1-14, x=1-13, x=1-12, x=1-11, x=1-10, x=10-271, x=20-271, x=30-271, x=40-271, x=50-271, x=60-271, x=70-271, x-80-271, x=100-271, x=125-271, x=150-271, x=175-271, x=200-271, x=225-271, x=1, x=2, x=3, x=4, x=5, x=6, x=7, x=8, x=9, x=10, x=11, x=12, x=13, x=14, x=15, x=16, x=17, x=18, x=19, x=20, x=21, x=22, x=23, x=24, x=25, x=26, x=27, x=28, x=29, x=30, x=40, x=50, x=60, x=70, x=80, x=90, x=100, x=110, x=125, x=150, x=175, x=200, x=225, x=250, or x=271), provided that the TREM has one or both of the following properties: no more than 15% of the residues arc N; or no more than 20 residues arc absent.

[1021] In an embodiment, a TREM disclosed herein comprises the sequence of Formula III LYS (SEQ ID NO: 600),
[1022] R₀-R₁-R₂-R₃-R₄-R₅-R₆-R₇-R₈-R₉-R₁₀-R₁₁-R₁₂-R₁₃-R₁₄-R₁₅-R₁₆-R₁₇-R₁₈-R₁₉-R₂₀-R₂₁-R₂₂-R₂₃-R₂₄-R₂₅-R₂₆-R₂₇-R₂₈-R₂₉-R₃₀-R₃₁-R₃₂-R₃₃-R₃₄-R₃₅-R₃₆-R₃₇-R₃₈-R₃₉-R₄₀-R₄₁-R₄₂-R₄₃- R₄₄-R₄₅-R₄₆-[R₄₇]ₓ-R₄₈-R₄₉-R₅₀-R₅₁-R₅₂-R₅₃-R₅₄-R₅₅-R₅₆-R₅₇-R₅₈-R₅₉-R₆₀-R₆₁-R₆₂-R₆₃-R₆₄-R₆₅- R₆₆-R₆₇-R₆₈-R₆₉-R₇₀-R₇₁-R₇₂
   wherein R is a ribonucleotide residue and the consensus for Lys is:
[1023] R₀, R₁₈, R₂₃=absent
[1024] R₀, R₁₄, R₃₄, R₄₁=are independently A or absent;
[1025] R₄₀=A, C or absent;
[1026] R₁, R₃, R₇, R₃₁=are independently A, C, G or absent;
[1027] R₄₈, R₆₅, R₆₈=are independently N or absent;
[1028] R₂, R₁₃, R₁₇, R₄₄, R₆₃, R₆₆=are independently A, C, U or absent;
[1029] R₅, R₁₅, R₁₉, R₂₀, R₂₅, R₂₇, R₂₉, R₅₀, R₅₂, R₅₆, R₇₀, R₇₂=are independently A, G or absent;
[1030] R₆, R₂₄, R₃₂, R₄₉=are independently A, G, U or absent;
[1031] R₁₂, R₂₆, R₄₆, R₅₇=are independently A, U or absent;
[1032] R₁₁, R₂₈, R₃₅, R₄₃=are independently C or absent;
[1033] R₁₀, R₄₅, R₆₁=are independently C, G or absent;
[1034] R₄, R₂₁, R₆₄=are independently C, G, U or absent;
[1035] R₃₇, R₅₃, R₅₅, R₅₉, R₆₀, R₆₂, R₆₇, R₇₁=are independently C, U or absent;
[1036] R₃₃, R₅₁=are independently G or absent;
[1037] R₈, R₃₀, R₅₈, R₆₉=are independently G, U or absent;
[1038] R₁₆, R₂₂, R₃₆, R₃₈, R₃₉, R₄₂, R₅₄=are independently U or absent;
[1039] [R₄₇]ₓ=N or absent;
[1040] wherein, e.g., x=1-271 (e.g., x=1-250, x=1-225, x=1-200, x=1-175, x=1-150, x=1-125, x=1-100, x=1-75, x=1-50, x=1-40, x=1-30, x=1-29, x=1-28, x=1-27, x=1-26, x=1-25, x=1-24, x=1-23, x=1-22, x=1-21, x=1-20, x=1-19, x=1-18, x=1-17, x=1-16, x=1-15, x=1-14, x=1-13, x=1-12, x=1-11, x=1-10, x=10-271, x=20-271, x=30-271, x=40-271, x=50-271, x=60-271, x=70-271, x=80-271, x=100-271, x=125-271, x=150-271, x=175-271, x=200-271, x=225-271, x=1, x=2, x=3, x=4, x=5, x=6, x=7, x=8, x=9, x=10, x=11, x=12, x=13, x=14, x=15, x=16, x=17, x=18, x=19, x=20, x=21, x=22, x=23, x=24, x=25, x=26, x=27, x=28, x=29, x=30, x=40, x=50, x=60, x=70, x=80, x=90, x=100, x=110, x=125, x=150, x=175, x=200, x=225, x=250, or x=271), provided that the TREM has one or both of the following properties: no more than 15% of the residues are N; or no more than 20 residues are absent.

### Phenylalanine TREM Consensus Sequence

[1041] In an embodiment, a TREM disclosed herein comprises the sequence of Formula I PHE (SEQ ID NO: 601),
[1042] R₀-R₁-R₂-R₃-R₄-R₅-R₆-R₇-R₈-R₉-R₁₀-R₁₁-R₁₂-R₁₃-R₁₄-R₁₅-R₁₆-R₁₇-R₁₈-R₁₉-R₂₀-R₂₁-R₂₂-R₂₃-R₂₄-R₂₅-R₂₆-R₂₇-R₂₈-R₂₉-R₃₀-R₃₁-R₃₂-R₃₃-R₃₄-R₃₅-R₃₆-R₃₇-R₃₈-R₃₉-R₄₀-R₄₁-R₄₂-R₄₃- R₄₄-R₄₅-R₄₆-[R₄₇]ₓ-R₄₈-R₄₉-R₅₀-R₅₁-R₅₂-R₅₃-R₅₄-R₅₅-R₅₆-R₅₇-R₅₈-R₅₉-R₆₀-R₆₁-R₆₂-R₆₃-R₆₄-R₆₅- R₆₆-R₆₇-R₆₈-R₆₉-R₇₀-R₇₁-R₇₂
   wherein R is a ribonucleotide residue and the consensus for Phe is:
[1043] R₀, R₂₃=are absent
[1044] R₀, R₁₄, R₃₈, R₃₉, R₅₇, R₇₂=are independently A or absent;
[1045] R₇₁=A, C or absent;
[1046] R₄₁, R₇₀=are independently A, C, G or absent;
[1047] R₄, R₅, R₆, R₃₀, R₃₁, R₃₂, R₃₄, R₄₂, R₄₄, R₄₅, R₄₆, R₄₈, R₄₉, R₅₈, R₆₂, R₆₃, R₆₆, R₆₇, R₆₈, R₆₉=are independently N or absent;
[1048] R₁₆, R₆₁, R₆₅=are independently A, C, U or absent;
[1049] R₁₅, R₂₆, R₂₇, R₂₉, R₄₀, R₅₆=are independently A, G or absent;
[1050] R₇, R₅₁=are independently A, G, U or absent;
[1051] R₂₂, R₂₄=are independently A, U or absent;
[1052] R₅₅, R₆₀=are independently C or absent;
[1053] R₂, R₃, R₂₁, R₃₃, R₄₃, R₅₀, R₆₄=are independently C, G, U or absent;
[1054] R₁₁, R₁₂, R₁₃, R₁₇, R₂₈, R₃₅, R₃₆, R₅₉=are independently C, U or absent;
[1055] R₁₀, R₁₉, R₂₀, R₂₅, R₃₇, R₅₂=are independently G or absent;
[1056] R₁=G, U or absent;
[1057] R₈, R₁₈, R₅₃, R₅₄=are independently U or absent;
[1058] [R₄₇]ₓ=N or absent;
[1059] wherein, e.g., x=1-271 (e.g., x=1-250, x=1-225, x=1-200, x=1-175, x=1-150, x=1-125, x=1-100, x=1-75, x=1-50, x=1-40, x=1-30, x=1-29, x=1-28, x=1-27, x=1-26, x=1-25, x=1-24, x=1-23, x=1-22, x=1-21, x=1-20, x=1-19, x=1-18, x=1-17, x=1-16, x=1-15, x=1-14, x=1-13, x=1-12, x=1-11, x=1-10, x=10-271, x=20-271, x=30-271, x=40-271, x=50-271, x=60-271, x=70-271, x=80-271, x=100-271, x=125-271, x=150-271, x=175-271, x=200-271, x=225-271, x=1, x=2, x=3, x=4, x=5, x=6, x=7, x=8, x=9, x=10, x=11, x=12, x=13, x=14, x=15, x=16, x=17, x=18, x=19, x=20, x=21, x=22, x=23, x=24, x=25, x=26, x=27, x=28, x=29, x=30, x=40, x=50, x=60, x=70, x=80, x=90, x=100, x=110, x=125, x=150, x=175, x=200, x=225, x=250, or x=271), provided that the TREM has one or both of the following properties: no more than 15% of the residues are N; or no more than 20 residues are absent.

[1060] In an embodiment, a TREM disclosed herein comprises the sequence of Formula II PHE (SEQ ID NO: 602),
[1061] R₀-R₁-R₂-R₃-R₄-R₅-R₆-R₇-R₈-R₉-R₁₀-R₁₁-R₁₂-R₁₃-R₁₄-R₁₅-R₁₆-R₁₇-R₁₈-R₁₉-R₂₀-R₂₁-R₂₂-R₂₃-R₂₄-R₂₅-R₂₆-R₂₇-R₂₈-R₂₉-R₃₀-R₃₁-R₃₂-R₃₃-R₃₄-R₃₅-R₃₆-R₃₇-R₃₈-R₃₉-R₄₀-R₄₁-R₄₂-R₄₃- R₄₄-R₄₅-R₄₆-[R₄₇]ₓ-R₄₈-R₄₉-R₅₀-R₅₁-R₅₂-R₅₃-R₅₄-R₅₅-R₅₆-R₅₇-R₅₈-R₅₉-R₆₀-R₆₁-R₆₂-R₆₃-R₆₄-R₆₅- R₆₆-R₆₇-R₆₈-R₆₉-R₇₀-R₇₁-R₇₂
   wherein R is a ribonucleotide residue and the consensus for Phe is:
[1062] R₀, R₁₈, R₂₃=absent
[1063] R₁₄, R₂₄, R₃₈, R₃₉, R₅₇, R₇₂=are independently A or absent;
[1064] R₄₆, R₇₁=are independently A, C or absent;
[1065] R₄, R₇₀=are independently A, C, G or absent;
[1066] R₄₅=A, C, U or absent;
[1067] R₆, R₇, R₁₅, R₂₆, R₂₇, R₃₂, R₃₄, R₄₀, R₄₁, R₅₆, R₆₉=are independently A, G or absent;
[1068] R₂₉=A, G, U or absent;
[1069] R₅, R₉, R₆₇=are independently A, U or absent;
[1070] R₃₅, R₄₉, R₅₅, R₆₀=are independently C or absent;
[1071] R₂₁, R₄₃, R₆₂=are independently C, G or absent;
[1072] R₂, R₃₃, R₆₈=are independently C, G, U or absent;
[1073] R₃, R₁₁, R₁₂, R₁₃, R₂₈, R₃₀, R₃₆, R₄₂, R₄₄, R₄₈, R₅₈, R₅₉, R₆₁, R₆₆=are independently C, U or absent;
[1074] R₁₀, R₁₉, R₂₀, R₂₅, R₃₇, R₅₁, R₅₂, R₆₃, R₆₄=are independently G or absent;
[1075] R₁, R₃₁, R₅₀=are independently G, U or absent;
[1076] R₈, R₁₆, R₁₇, R₂₂, R₅₃, R₅₄, R₆₅=are independently U or absent;
[1077] [R₄₇]ₓ=N or absent;
[1078] wherein, e.g., x=1-271 (e.g., x=1-250, x=1-225, x=1-200, x=1-175, x=1-150, x=1-125, x=1-100, x=1-75, x=1-50, x=1-40, x=1-30, x=1-29, x=1-28, x=1-27, x=1-26, x=1-25, x=1-24, x=1-23, x=1-22, x=1-21, x=1-20, x=1-19, x=1-18, x=1-17, x=1-16, x=1-15, x=1-14, x=1-13, x=1-12, x=1-11, x=1-10, x=10-271, x=20-271, x=30-271, x=40-271, x=50-271, x=60-271, x=70-271, x=80-271, x=100-271, x=125-271, x=150-271, x=175-271, x=200-271, x=225-271, x=1, x=2, x=3, x=4, x=5, x=6, x=7, x=8, x=9, x=10, x=11, x=12, x=13, x=14, x=15, x=16, x=17, x=18, x=19, x=20, x=21, x=22, x=23, x=24, x=25, x=26, x=27, x=28, x=29, x=30, x=40, x=50, x=60, x=70, x=80, x=90, x=100, x=110, x=125, x=150, x=175, x=200, x=225, x=250, or x=271), provided that the TREM has one or both of the following properties: no more than 15% of the residues are N; or no more than 20 residues are absent.

[1079] In an embodiment, a TREM disclosed herein comprises the sequence of Formula III PHE (SEQ ID NO: 603),
[1080] R₀-R₁-R₂-R₃-R₄-R₅-R₆-R₇-R₈-R₉-R₁₀-R₁₁-R₁₂-R₁₃-R₁₄-R₁₅-R₁₆-R₁₇-R₁₈-R₁₉-R₂₀-R₂₁-R₂₂-R₂₃-R₂₄-R₂₅-R₂₆-R₂₇-R₂₈-R₂₉-R₃₀-R₃₁-R₃₂-R₃₃-R₃₄-R₃₅-R₃₆-R₃₇-R₃₈-R₃₉-R₄₀-R₄₁-R₄₂-R₄₃- R₄₄-R₄₅-R₄₆-[R₄₇]ₓ-R₄₈-R₄₉-R₅₀-R₅₁-R₅₂-R₅₃-R₅₄-R₅₅-R₅₆-R₅₇-R₅₈-R₅₉-R₆₀-R₆₁-R₆₂-R₆₃-R₆₄-R₆₅- R₆₆-R₆₇-R₆₈-R₆₉-R₇₀-R₇₁-R₇₂
   wherein R is a ribonucleotide residue and the consensus for Phe is:
[1081] R₀, R₁₈, R₂₂, R₂₃=absent
[1082] R₅, R₇, R₁₄, R₂₄, R₂₆, R₃₂, R₃₄, R₃₈, R₃₉, R₄₁, R₅₇, R₇₂=are independently A or absent;
[1083] R₄₆=A, C or absent;
[1084] R₇₀=A, C, G or absent;
[1085] R₄, R₆, R₁₅, R₅₆, R₆₉=are independently A, G or absent;
[1086] R₀, R₄₅=are independently A, U or absent;
[1087] R₂, R₁₁, R₁₃, R₃₅, R₄₃, R₄₉, R₅₅, R₆₀, R₆₈, R₇₁=are independently C or absent;
[1088] R₃₃=C, G or absent;
[1089] R₃, R₂₈, R₃₆, R₄₈, R₅₈, R₅₉, R₆₁=are independently C, U or absent;
[1090] R₁, R₁₀, R₁₉, R₂₀, R₂₁, R₂₅, R₂₇, R₂₉, R₃₇, R₄₀, R₅₁, R₅₂, R₆₂, R₆₃, R₆₄=are independently G or absent;
[1091] R₈, R₁₂, R₁₆, R₁₇, R₃₀, R₃₁, R₄₂, R₄₄, R₅₀, R₅₃, R₅₄, R₆₅, R₆₆, R₆₇=are independently U or absent;
[1092] [R₄₇]ₓ=N or absent;
[1093] wherein, e.g., x=1-271 (e.g., x=1-250, x=1-225, x=1-200, x=1-175, x=1-150, x=1-125, x=1-100, x=1-75, x=1-50, x=1-40, x=1-30, x=1-29, x=1-28, x=1-27, x=1-26, x=1-25, x=1-24, x=1-23, x=1-22, x=1-21, x=1-20, x=1-19, x=1-18, x=1-17, x=1-16, x=1-15, x=1-14, x=1-13, x=1-12, x=1-11, x=1-10, x=10-271, x=20-271, x=30-271, x=40-271, x=50-271, x=60-271, x=70-271, x=80-271, x=100-271, x=125-271, x=150-271, x=175-271, x=200-271, x=225-271, x=1, x=2, x=3, x=4, x=5, x=6, x=7, x=8, x=9, x=10, x=11, x=12, x=13, x=14, x=15, x=16, x=17, x=18, x=19, x=20, x=21, x=22, x=23, x=24, x=25, x=26, x=27, x=28, x=29, x=30, x=40, x=50, x=60, x=70, x=80, x=90, x=100, x=110, x=125, x=150, x=175, x=200, x=225, x=250, or x=271), provided that the TREM has one or both of the following properties: no more than 15% of the residues are N; or no more than 20 residues are absent.

### Proline TREM Consensus Sequence

[1094] In an embodiment, a TREM disclosed herein comprises the sequence of Formula I PRO (SEQ ID NO: 604),
[1095] R₀-R₁-R₂-R₃-R₄-R₅-R₆-R₇-R₈-R₉-R₁₀-R₁₁-R₁₂-R₁₃-R₁₄-R₁₅-R₁₆-R₁₇-R₁₈-R₁₉-R₂₀-R₂₁-R₂₂-R₂₃-R₂₄-R₂₅-R₂₆-R₂₇-R₂₈-R₂₉-R₃₀-R₃₁-R₃₂-R₃₃-R₃₄-R₃₅-R₃₆-R₃₇-R₃₈-R₃₉-R₄₀-R₄₁-R₄₂-R₄₃- R₄₄-R₄₅-R₄₆-[R₄₇]ₓ-R₄₈-R₄₉-R₅₀-R₅₁-R₅₂-R₅₃-R₅₄-R₅₅-R₅₆-R₅₇-R₅₈-R₅₉-R₆₀-R₆₁-R₆₂-R₆₃-R₆₄-R₆₅- R₆₆-R₆₇-R₆₈-R₆₉-R₇₀-R₇₁-R₇₂
   wherein R is a ribonucleotide residue and the consensus for Pro is:
[1096] R₀=absent
[1097] R₁₄, R₅₇=are independently A or absent;
[1098] R₇₀, R₇₂=are independently A, C or absent;
[1099] R₉, R₂₆, R₂₇=are independently A, C, G or absent;
[1100] R₄, R₅, R₆, R₁₆, R₂₁, R₂₉, R₃₀, R₃₁, R₃₂, R₃₃, R₃₄, R₃₇, R₄₁, R₄₂, R₄₃, R₄₄, R₄₅, R₄₆, R₄₈, R₄₉, R₅₀, R 58, R₆₁, R₆₂, R₆₃, R₆₄, R₆₆, R₆₇, R₆₈=are independently N or absent;
[1101] R₃₅, R₆₅=are independently A, C, U or absent;
[1102] R₂₄, R₄₀, R₅₆=are independently A, G or absent;
[1103] R₇, R₂₅, R₅₁=are independently A, G, U or absent;
[1104] R₅₅, R₆₀=are independently C or absent;
[1105] R₁, R₃, R₇₁=are independently C, G or absent;
[1106] R₁₁, R₁₂, R₂₀, R₆₉=are independently C, G, U or absent;
[1107] R₁₃, R₁₇, R₁₈, R₂₂, R₂₃, R₂₈, R₅₉=are independently C, U or absent;
[1108] R₁₀, R₁₅, R₁₉, R₃₈, R₃₉, R₅₂=are independently G or absent;
[1109] R₂=are independently G, U or absent;
[1110] R₈, R₃₆, R₅₃, R₅₄=are independently U or absent;
[1111] [R₄₇]ₓ=N or absent;
[1112] wherein, e.g., x=1-271 (e.g., x=1-250, x=1-225, x=1-200, x=1-175, x=1-150, x=1-125, x=1-100, x=1-75, x=1-50, x=1-40, x=1-30, x=1-29, x=1-28, x=1-27, x=1-26, x=1-25, x=1-24, x=1-23, x=1-22, x=1-21, x=1-20, x=1-19, x=1-18, x=1-17, x=1-16, x=1-15, x=1-14, x=1-13, x=1-12, x=1-11, x=1-10, x=10-271, x=20-271, x=30-271, x=40-271, x=50-271, x=60-271, x=70-271, x-80-271, x=100-271, x=125-271, x=150-271, x=175-271, x=200-271, x=225-271, x=1, x=2, x=3, x=4, x=5, x=6, x=7, x=8, x=9, x=10, x=11, x=12, x=13, x=14, x=15, x=16, x=17, x=18, x=19, x=20, x=21, x=22, x=23, x=24, x=25, x=26, x=27, x=28, x=29, x=30, x=40, x=50, x=60, x=70, x=80, x=90, x=100, x=110, x=125, x=150, x=175, x=200, x=225, x=250, or x=271), provided that the TREM has one or both of the following properties: no more than 15% of the residues are N; or no more than 20 residues are absent.

[1113] In an embodiment, a TREM disclosed herein comprises the sequence of Formula II PRO (SEQ ID NO: 605),
[1114] R₀-R₁-R₂-R₃-R₄-R₅-R₆-R₇-R₈-R₉-R₁₀-R₁₁-R₁₂-R₁₃-R₁₄-R₁₅-R₁₆-R₁₇-R₁₈-R₁₉-R₂₀-R₂₁-R₂₂-R₂₃-R₂₄-R₂₅-R₂₆-R₂₇-R₂₈-R₂₉-R₃₀-R₃₁-R₃₂-R₃₃-R₃₄-R₃₅-R₃₆-R₃₇-R₃₈-R₃₉-R₄₀-R₄₁-R₄₂-R₄₃- R₄₄-R₄₅-R₄₆-[R₄₇]ₓ-R₄₈-R₄₉-R₅₀-R₅₁-R₅₂-R₅₃-R₅₄-R₅₅-R₅₆-R₅₇-R₅₈-R₅₉-R₆₀-R₆₁-R₆₂-R₆₃-R₆₄-R₆₅- R₆₆-R₆₇-R₆₈-R₆₉-R₇₀-R₇₁-R₇₂
   wherein R is a ribonucleotide residue and the consensus for Pro is:
[1115] R₀, R₁₇, R₁₈, R₂₂, R₂₃=absent;
[1116] R₁₄, R₄₅, R₅₆, R₅₇, R₅₈, R₆₅, R₆₈=are independently A or absent;
[1117] R₆₁=A, C, G or absent;
[1118] R₄₃=N or absent;
[1119] R₃₇=A, C, U or absent;
[1120] R₂₄, R₂₇, R₃₃, R₄₀, R₄₄, R₆₃=are independently A, G or absent;
[1121] R₃, R₁₂, R₃₀, R₃₂, R₄₈, R₅₅, R₆₀, R₇₀, R₇₁, R₇₂=are independently C or absent;
[1122] R₅, R₃₄, R₄₂, R₆₆=are independently C, G or absent;
[1123] R₂₀=C, G, U or absent;
[1124] R₃₅, R₄₁, R₄₉, R₆₂=are independently C, U or absent;
[1125] R₁, R₂, R₆, R₉, R₁₀, R₁₅, R₁₉, R₂₆, R₃₈, R₃₉, R₄₆, R₅₀, R₅₁, R₅₂, R₆₄, R₆₇, R₆₉=are independently G or absent;
[1126] R₁₁, R₁₆=are independently G, U or absent;
[1127] R₄, R₇, R₈, R₁₃, R₂₁, R₂₅, R₂₈, R₂₉, R₃₁, R₃₆, R₅₃, R₅₄, R₅₉=are independently U or absent;
[1128] [R₄₇]ₓ=N or absent;
[1129] wherein, e.g., x=1-271 (e.g., x=1-250, x=1-225, x=1-200, x=1-175, x=1-150, x=1-125, x=1-100, x=1-75, x=1-50, x=1-40, x=1-30, x=1-29, x=1-28, x=1-27, x=1-26, x=1-25, x=1-24, x=1-23, x=1-22, x=1-21, x=1-20, x=1-19, x=1-18, x=1-17, x=1-16, x=1-15, x=1-14, x=1-13, x=1-12, x=1-11, x=1-10, x=10-271, x=20-271, x=30-271, x=40-271, x=50-271, x=60-271, x=70-271, x=80-271, x=100-271, x=125-271, x=150-271, x=175-271, x=200-271, x=225-271, x=1, x=2, x=3, x=4, x=5, x=6, x=7, x=8, x=9, x=10, x=11, x=12, x=13, x=14, x=15, x=16, x=17, x=18, x=19, x=20, x=21, x=22, x=23, x=24, x=25, x=26, x=27, x=28, x=29, x=30, x=40, x=50, provided that the TREM has one or both of the following properties: no more than 15% of the residues are N; or no more than 20 residues are absent.

[1130] In an embodiment, a TREM disclosed herein comprises the sequence of Formula III PRO (SEQ ID NO: 606),
[1131] R₀-R₁-R₂-R₃-R₄-R₅-R₆-R₇-R₈-R₉-R₁₀-R₁₁-R₁₂-R₁₃-R₁₄-R₁₅-R₁₆-R₁₇-R₁₈-R₁₉-R₂₀-R₂₁-R₂₂-R₂₃-R₂₄-R₂₅-R₂₆-R₂₇-R₂₈-R₂₉-R₃₀-R₃₁-R₃₂-R₃₃-R₃₄-R₃₅-R₃₆-R₃₇-R₃₈-R₃₉-R₄₀-R₄₁-R₄₂-R₄₃- R₄₄-R₄₅-R₄₆-[R₄₇]ₓ-R₄₈-R₄₉-R₅₀-R₅₁-R₅₂-R₅₃-R₅₄-R₅₅-R₅₆-R₅₇-R₅₈-R₅₉-R₆₀-R₆₁-R₆₂-R₆₃-R₆₄-R₆₅- R₆₆-R₆₇-R₆₈-R₆₉-R₇₀-R₇₁-R₇₂
   wherein R is a ribonucleotide residue and the consensus for Pro is:
[1132] R₀, R₁₇, R₁₈, R₂₂, R₂₃=absent
[1133] R₁₄, R₄₅, R₅₆, R₅₇, R₅₈, R₆₅, R₆₈=are independently A or absent;
[1134] R₃₇=A, C, U or absent;
[1135] R₂₄, R₂₇, R₄₀=are independently A, G or absent;
[1136] R₃, R₅, R₁₂, R₃₀, R₃₂, R₄₈, R₄₉, R₅₅, R₆₀, R₆₁, R₆₂, R₆₆, R₇₀, R₇₁, R₇₂=are independently C or absent;
[1137] R₃₄, R₄₂=are independently C, G or absent;
[1138] R₄₃=C, G, U or absent;
[1139] R₄₁=C, U or absent;
[1140] R₁, R₂, R₆, R₀, R₁₀, R₁₅, R₁₉, R₂₀, R₂₆, R₃₃, R₃₈, R₃₉, R₄₄, R₄₆, R₅₀, R₅₁, R₅₂, R₆₃, R₆₄, R₆₇, R₆₉=are independently G or absent;
[1141] R₁₆=G, U or absent;
[1142] R₄, R₇, R₈, R₁₁, R₁₃, R₂₁, R₂₅, R₂₈, R₂₉, R₃₁, R₃₅, R₃₆, R₅₃, R₅₄, R₅₉=are independently U or absent;
[1143] [R₄₇]ₓ=N or absent;
[1144] wherein, e.g., x=1-271 (e.g., x=1-250, x=1-225, x=1-200, x=1-175, x=1-150, x=1-125, x=1-100, x=1-75, x=1-50, x=1-40, x=1-30, x=1-29, x=1-28, x=1-27, x=1-26, x=1-25, x=1-24, x=1-23, x=1-22, x=1-21, x=1-20, x=1-19, x=1-18, x=1-17, x=1-16, x=1-15, x=1-14, x=1-13, x=1-12, x=1-11, x=1-10, x=10-271, x=20-271, x=30-271, x=40-271, x=50-271, x=60-271, x=70-271, x=80-271, x=100-271, x=125-271, x=150-271, x=175-271, x=200-271, x=225-271, x=1, x=2, x=3, x=4, x=5, x=6, x=7, x=8, x=9, x=10, x=11, x=12, x=13, x=14, x=15, x=16, x=17, x=18, x=19, x=20, x=21, x=22, x=23, x=24, x=25, x=26, x=27, x=28, x=29, x=30, x=40, x=50, x=60, x=70, x=80, x=90, x=100, x=110, x=125, x=150, x=175, x=200, x=225, x=250, or x=271), provided that the TREM has one or both of the following properties: no more than 15% of the residues arc N; or no more than 20 residues arc absent.

### Serine TREM Consensus Sequence

[1145] In an embodiment, a TREM disclosed herein comprises the sequence of Formula I _{SER} (SEQ ID NO: 607),
[1146] R₀-R₁-R₂-R₃-R₄-R₅-R₆-R₇-R₈-R₉-R₁₀-R₁₁-R₁₂-R₁₃-R₁₄-R₁₅-R₁₆-R₁₇-R₁₈-R₁₉-R₂₀-R₂₁-R 22-R₂₃-R₂₄-R₂₅-R₂₆-R₂₇-R₂₈-R₂₉-R₃₀-R₃₁-R₃₂-R₃₃-R₃₄-R₃₅-R₃₆-R₃₇-R₃₈-R₃₉-R₄₀-R₄₁-R₄₂-R₄₃- R₄₄-R₄₅-R₄₆-[R₄₇]ₓ-R₄₈-R₄₉-R₅₀-R₅₁-R₅₂-R₅₃-R₅₄-R₅₅-R₅₆-R₅₇-R₅₈-R₅₉-R₆₀-R₆₁-R₆₂-R₆₃-R₆₄-R₆₅- R₆₆-R₆₇-R₆₈-R₆₉-R₇₀-R₇₁-R₇₂
   wherein R is a ribonucleotide residue and the consensus for Ser is:
[1147] R₀=absent;
[1148] R₁₄, R₂₄, R₅₇=are independently A or absent;
[1149] R₄₁=A, C or absent;
[1150] R₂, R₃, R₄, R₅, R₆, R₇, R₀, R₁₀, R₁₁, R₁₂, R₁₃, R₁₆, R₂₁, R₂₅, R₂₆, R₂₇, R₂₈, R₃₀, R₃₁, R₃₂, R₃₃, R₃₄, R₃₇, R₄₂, R₄₃, R₄₄, R₄₅, R₄₆, R₄₈, R₄₉, R₅₀, R₆₂, R₆₃, R₆₄, R₆₅, R₆₆, R₆₇, R₆₈, R₆₉, R₇₀=are independently N or absent;
[1151] R₁₈=A, C, U or absent;
[1152] R₁₅, R₄₀, R₅₁, R₅₆=are independently A, G or absent;
[1153] R₁, R₂₉, R₅₈, R₇₂=are independently A, G, U or absent;
[1154] R₃₉=A, U or absent;
[1155] R₆₀=C or absent;
[1156] R₃₈=C, G or absent;
[1157] R₁₇, R₂₂, R₂₃, R₇₁=are independently C, G, U or absent;
[1158] R₈, R₃₅, R₃₆, R₅₅, R₅₉, R₆₁=are independently C, U or absent;
[1159] R₁₉, R₂₀=are independently G or absent;
[1160] R₂=G, U or absent;
[1161] R₅₃, R₅₄=are independently U or absent;
[1162] [R₄₇]ₓ=N or absent;
[1163] wherein, e.g., x=1-271 (e.g., x=1-250, x=1-225, x=1-200, x=1-175, x=1-150, x=1-125, x=1-100, x=1-75, x=1-50, x=1-40, x=1-30, x=1-29, x=1-28, x=1-27, x=1-26, x=1-25, x=1-24, x=1-23, x=1-22, x=1-21, x=1-20, x=1-19, x=1-18, x=1-17, x=1-16, x=1-15, x=1-14, x=1-13, x=1-12, x=1-11, x=1-10, x=10-271, x=20-271, x=30-271, x=40-271, x=50-271, x=60-271, x=70-271, x=80-271, x=100-271, x=125-271, x=150-271, x=175-271, x=200-271, x=225-271, x=1, x=2, x=3, x=4, x=5, x=6, x=7, x=8, x=9, x=10, x=11, x=12, x=13, x=14, x=15, x=16, x=17, x=18, x=19, x=20, x=21, x=22, x=23, x=24, x=25, x=26, x=27, x=28, x=29, x=30, x=40, x=50, x=60, x=70, x=80, x=90, x=100, x=110, x=125, x=150, x=175, x=200, x=225, x=250, or x=271), provided that the TREM has one or both of the following properties: no more than 15% of the residues are N; or no more than 20 residues are absent.

[1164] In an embodiment, a TREM disclosed herein comprises the sequence of Formula II _{SER} (SEQ ID NO: 608),
[1165] R₀-R₁-R₂-R₃-R₄-R₅-R₆-R₇-R₈-R₉-R₁₀-R₁₁-R₁₂-R₁₃-R₁₄-R₁₅-R₁₆-R₁₇-R₁₈-R₁₉-R₂₀-R₂₁-R₂₂-R₂₃-R₂₄-R₂₅-R₂₆-R₂₇-R₂₈-R₂₉-R₃₀-R₃₁-R₃₂-R₃₃-R₃₄-R₃₅-R₃₆-R₃₇-R₃₈-R₃₉-R₄₀-R₄₁-R₄₂-R₄₃- R₄₄-R₄₅-R₄₆-[R₄₇]ₓ-R₄₈-R₄₉-R₅₀-R₅₁-R₅₂-R₅₃-R₅₄-R₅₅-R₅₆-R₅₇-R₅₈-R₅₉-R₆₀-R₆₁-R₆₂-R₆₃-R₆₄-R₆₅- R₆₆-R₆₇-R₆₈-R₆₉-R₇₀-R₇₁-R₇₂
   wherein R is a ribonucleotide residue and the consensus for Ser is:
[1166] R₀, R₂₃=absent
[1167] R₁₄, R₂₄, R₄₁, R₅₇=are independently A or absent;
[1168] R₄₄=A, C or absent;
[1169] R₂₅, R₄₅, R₄₈=are independently A, C, G or absent;
[1170] R₂, R₃, R₄, R₅, R₃₇, R₅₀, R₆₂, R₆₆, R₆₇, R₆₉, R₇₀=are independently N or absent;
[1171] R₁₂, R₂₈, R₆₅=are independently A, C, U or absent;
[1172] R₉, R₁₅, R₂₉, R₃₄, R₄₀, R₅₆, R₆₃=are independently A, G or absent;
[1173] R₇, R₂₆, R₃₀, R₃₃, R₄₆, R₅₈, R₇₂=are independently A, G, U or absent;
[1174] R₃₉=A, U or absent;
[1175] R₁₁, R₃₅, R₆₀, R₆₁=are independently C or absent;
[1176] R₁₃, R₃₈=are independently C, G or absent;
[1177] R₆, R₁₇, R₃₁, R₄₃, R₆₄, R₆₈=are independently C, G, U or absent;
[1178] R₃₆, R₄₂, R₄₉, R₅₅, R₅₉, R₇₁=are independently C, U or absent;
[1179] R₁₀, R₁₉, R₂₀, R₂₇, R₅₁=are independently G or absent;
[1180] R₁, R₁₆, R₃₂, R₅₂=are independently G, U or absent;
[1181] R₈, R₁₈, R₂₁, R₂₂, R₅₃, R₅₄=are independently U or absent;
[1182] [R₄₇]ₓ=N or absent;
[1183] wherein, e.g., x=1-271 (e.g., x=1-250, x=1-225, x=1-200, x=1-175, x=1-150, x=1-125, x=1-100, x=1-75, x=1-50, x=1-40, x=1-30, x=1-29, x=1-28, x=1-27, x=1-26, x=1-25, x=1-24, x=1-23, x=1-22, x=1-21, x=1-20, x=1-19, x=1-18, x=1-17, x=1-16, x=1-15, x=1-14, x=1-13, x=1-12, x=1-11, x=1-10, x=10-271, x=20-271, x=30-271, x=40-271, x=50-271, x=60-271, x=70-271, x=80-271, x=100-271, x=125-271, x=150-271, x=175-271, x=200-271, x=225-271, x=1, x=2, x=3, x=4, x=5, x=6, x=7, x=8, x=9, x=10, x=11, x=12, x=13, x=14, x=15, x=16, x=17, x=18, x=19, x=20, x=21, x=22, x=23, x=24, x=25, x=26, x=27, x=28, x=29, x=30, x=40, x=50, x=60, x=70, x=80, x=90, x=100, x=110, x=125, x=150, x=175, x=200, x=225, x=250, or x=271), provided that the TREM has one or both of the following properties: no more than 15% of the residues are N; or no more than 20 residues are absent.

[1184] In an embodiment, a TREM disclosed herein comprises the sequence of Formula III _{SER} (SEQ ID NO: 609),
[1185] R₀-R₁-R₂-R₃-R₄-R₅-R₆-R₇-R₈-R₉-R₁₀-R₁₁-R₁₂-R₁₃-R₁₄-R₁₅-R₁₆-R₁₇-R₁₈-R₁₉-R₂₀-R₂₁-R₂₂-R₂₃-R₂₄-R₂₅-R₂₆-R₂₇-R₂₈-R₂₉-R₃₀-R₃₁-R₃₂-R₃₃-R₃₄-R₃₅-R₃₆-R₃₇-R₃₈-R₃₉-R₄₀-R₄₁-R₄₂-R₄₃- R₄₄-R₄₅-R₄₆-[R₄₇]ₓ-R₄₈-R₄₉-R₅₀-R₅₁-R₅₂-R₅₃-R₅₄-R₅₅-R₅₆-R₅₇-R₅₈-R₅₉-R₆₀-R₆₁-R₆₂-R₆₃-R₆₄-R₆₅- R₆₆-R₆₇-R₆₈-R₆₉-R₇₀-R₇₁-R₇₂
   wherein R is a ribonucleotide residue and the consensus for Ser is:
[1186] R₀, R₂₃=absent
[1187] R₁₄, R₂₄, R₄₁, R₅₇, R₅₈=are independently A or absent;
[1188] R₄₄=A, C or absent;
[1189] R₂₅, R₄₈=are independently A, C, G or absent;
[1190] R₂, R₃, R₅, R₃₇, R₆₆, R₆₇, R₆₉, R₇₀=are independently N or absent;
[1191] R₁₂, R₂₈, R₆₂=are independently A, C, U or absent;
[1192] R₇, R₉, R₁₅, R₂₉, R₃₃, R₃₄, R₄₀, R₄₅, R₅₆, R₆₃=are independently A, G or absent;
[1193] R₄, R₂₆, R₄₆,R 50=are independently A, G, U or absent;
[1194] R₃₀, R₃₉=are independently A, U or absent;
[1195] R₁₁, R₁₇, R₃₅, R₆₀, R₆₁=are independently C or absent;
[1196] R₁₃, R₃₈=are independently C, G or absent;
[1197] R₆, R₆₄=are independently C, G, U or absent;
[1198] R₃₁, R₄₂, R₄₃, R₄₉, R₅₅, R₅₉, R₆₅, R₆₈, R₇₁=are independently C, U or absent;
[1199] R₁₀, R₁₉, R₂₀, R₂₇, R₅₁, R₅₂=are independently G or absent;
[1200] R₁, R₁₆, R₃₂, R₇₂=are independently G, U or absent;
[1201] R₈, R₁₈, R₂₁, R₂₂, R₃₆, R₅₃, R₅₄=are independently U or absent;
[1202] [R₄₇]ₓ=N or absent;
[1203] wherein, e.g., x=1-271 (e.g., x=1-250, x=1-225, x=1-200, x=1-175, x=1-150, x=1-125, x=1-100, x=1-75, x=1-50, x=1-40, x=1-30, x=1-29, x=1-28, x=1-27, x=1-26, x=1-25, x=1-24, x=1-23, x=1-22, x=1-21, x=1-20, x=1-19, x=1-18, x=1-17, x=1-16, x=1-15, x=1-14, x=1-13, x=1-12, x=1-11, x=1-10, x=10-271, x=20-271, x=30-271, x=40-271, x=50-271, x=60-271, x=70-271, x-80-271, x=100-271, x=125-271, x=150-271, x=175-271, x=200-271, x=225-271, x=1, x=2, x=3, x=4, x=5, x=6, x=7, x=8, x=9, x=10, x=11, x=12, x=13, x=14, x=15, x=16, x=17, x=18, x=19, x=20, x=21, x=22, x=23, x=24, x=25, x=26, x=27, x=28, x=29, x=30, x=40, x=50, x=60, x=70, x=80, x=90, x=100, x=110, x=125, x=150, x=175, x=200, x=225, x=250, or x=271), provided that the TREM has one or both of the following properties: no more than 15% of the residues are N; or no more than 20 residues are absent.

### Threonine TREM Consensus Sequence

[1204] In an embodiment, a TREM disclosed herein comprises the sequence of Formula I _{THR} (SEQ ID NO: 610),
[1205] R₀-R₁-R₂-R₃-R₄-R₅-R₆-R₇-R₈-R₉-R₁₀-R₁₁-R₁₂-R₁₃-R₁₄-R₁₅-R₁₆-R₁₇-R₁₈-R₁₉-R₂₀-R₂₁-R₂₂-R₂₃-R₂₄-R₂₅-R₂₆-R₂₇-R₂₈-R₂₉-R₃₀-R₃₁-R₃₂-R₃₃-R₃₄-R₃₅-R₃₆-R₃₇-R₃₈-R₃₉-R₄₀-R₄₁-R₄₂-R₄₃- R₄₄-R₄₅-R₄₆-[R₄₇]ₓ-R₄₈-R₄₉-R₅₀-R₅₁-R₅₂-R₅₃-R₅₄-R₅₅-R₅₆-R₅₇-R₅₈-R₅₉-R₆₀-R₆₁-R₆₂-R₆₃-R₆₄-R₆₅- R₆₆-R₆₇-R₆₈-R₆₉-R₇₀-R₇₁-R₇₂
   wherein R is a ribonucleotide residue and the consensus for Thr is:
[1206] R₀, R₂₃=absent
[1207] R₁₄, R₄₁, R₅₇=are independently A or absent;
[1208] R₅₆, R₇₀=are independently A, C, G or absent;
[1209] R₄, R₅, R₆, R₇, R₁₂, R₁₆, R₂₆, R₃₀, R₃₁, R₃₂, R₃₄, R₃₇, R₄₂, R₄₄, R₄₅, R₄₆, R₄₈, R₄₉, R₅₀, R₅₈, R₆₂, R₆₃, R₆₄, R₆₅, R₆₆, R₆₇, R₆₈, R₇₂=are independently N or absent;
[1210] R₁₃, R₁₇, R₂₁, R₃₅, R₆₁=are independently A, C, U or absent;
[1211] R₁, R₉, R₂₄, R₂₇, R₂₉, R₆₉=are independently A, G or absent;
[1212] R₁₅, R₂₅, R₅₁=are independently A, G, U or absent;
[1213] R₄₀, R₅₃=are independently A, U or absent;
[1214] R₃₃, R₄₃=are independently C, G or absent;
[1215] R₂, R₃, R₅₉=are independently C, G, U or absent;
[1216] R₁₁, R₁₈, R₂₂, R₂₈, R₃₆, R₅₄, R₅₅, R₆₀, R₇₁=are independently C, U or absent;
[1217] R₁₀, R₂₀, R₃₈, R₅₂=are independently G or absent;
[1218] R₁₉=G, U or absent;
[1219] R₈, R₃₉=are independently U or absent;
[1220] [R₄₇]ₓ=N or absent;
[1221] wherein, e.g., x=1-271 (e.g., x=1-250, x=1-225, x=1-200, x=1-175, x=1-150, x=1-125, x=1-100, x=1-75, x=1-50, x=1-40, x=1-30, x=1-29, x=1-28, x=1-27, x=1-26, x=1-25, x=1-24, x=1-23, x=1-22, x=1-21, x=1-20, x=1-19, x=1-18, x=1-17, x=1-16, x=1-15, x=1-14, x=1-13, x=1-12, x=1-11, x=1-10, x=10-271, x=20-271, x=30-271, x=40-271, x=50-271, x=60-271, x=70-271, x-80-271, x=100-271, x=125-271, x=150-271, x=175-271, x=200-271, x=225-271, x=1, x=2, x=3, x=4, x=5, x=6, x=7, x=8, x=9, x=10, x=11, x=12, x=13, x=14, x=15, x=16, x=17, x=18, x=19, x=20, x=21, x=22, x=23, x=24, x=25, x=26, x=27, x=28, x=29, x=30, x=40, x=50, x=60, x=70, x=80, x=90, x=100, x=110, x=125, x=150, x=175, x=200, x=225, x=250, or x=271), provided that the TREM has one or both of the following properties: no more than 15% of the residues are N; or no more than 20 residues are absent.

[1222] In an embodiment, a TREM disclosed herein comprises the sequence of Formula II THR (SEQ ID NO: 611),
[1223] R₀-R₁-R₂-R₃-R₄-R₅-R₆-R₇-R₈-R₉-R₁₀-R₁₁-R₁₂-R₁₃-R₁₄-R₁₅-R₁₆-R₁₇-R₁₈-R₁₉-R₂₀-R₂₁-R₂₂-R₂₃-R₂₄-R₂₅-R₂₆-R₂₇-R₂₈-R₂₉-R₃₀-R₃₁-R₃₂-R₃₃-R₃₄-R₃₅-R₃₆-R₃₇-R₃₈-R₃₉-R₄₀-R₄₁-R₄₂-R₄₃- R₄₄-R₄₅-R₄₆-[R₄₇]ₓ-R₄₈-R₄₉-R₅₀-R₅₁-R₅₂-R₅₃-R₅₄-R₅₅-R₅₆-R₅₇-R₅₈-R₅₉-R₆₀-R₆₁-R₆₂-R₆₃-R₆₄-R₆₅- R₆₆-R₆₇-R₆₈-R₆₉-R₇₀-R₇₁-R₇₂
   wherein R is a ribonucleotide residue and the consensus for Thr is:
[1224] R₀, R₁₈, R₂₃=absent
[1225] R₁₄, R₄₁, R₅₇=are independently A or absent;
[1226] R₀, R₄₂, R₄₄, R₄₈, R₅₆, R₇₀=are independently A, C, G or absent;
[1227] R₄, R₆, R₁₂, R₂₆, R₄₉, R₅₈, R₆₃, R₆₄, R₆₆, R₆₈=are independently N or absent;
[1228] R₁₃, R₂₁, R₃₁, R₃₇, R₆₂=are independently A, C, U or absent;
[1229] R₁, R₁₅, R₂₄, R₂₇, R₂₉, R₄₆, R₅₁, R₆₉=are independently A, G or absent;
[1230] R₇, R₂₅, R₄₅, R₅₀, R₆₇=are independently A, G, U or absent;
[1231] R₄₀, R₅₃=are independently A, U or absent;
[1232] R₃₅=C or absent;
[1233] R₃₃, R₄₃=are independently C, G or absent;
[1234] R₂, R₃, R₅, R₁₆, R₃₂, R₃₄, R₅₉, R₆₅, R₇₂=are independently C, G, U or absent;
[1235] R₁₁, R₁₇, R₂₂, R₂₈, R₃₀, R₃₆, R₅₅, R₆₀, R₆₁, R₇₁=are independently C, U or absent;
[1236] R₁₀, R₁₉, R₂₀, R₃₈, R₅₂=are independently G or absent;
[1237] R₈, R₃₉, R₅₄=are independently U or absent;
[1238] [R₄₇]ₓ=N or absent;
[1239] wherein, e.g., x=1-271 (e.g., x=1-250, x=1-225, x=1-200, x=1-175, x=1-150, x=1-125, x=1-100, x=1-75, x=1-50, x=1-40, x=1-30, x=1-29, x=1-28, x=1-27, x=1-26, x=1-25, x=1-24, x=1-23, x=1-22, x=1-21, x=1-20, x=1-19, x=1-18, x=1-17, x=1-16, x=1-15, x=1-14, x=1-13, x=1-12, x=1-11, x=1-10, x=10-271, x=20-271, x=30-271, x=40-271, x=50-271, x=60-271, x=70-271, x=80-271, x=100-271, x=125-271, x=150-271, x=175-271, x=200-271, x=225-271, x=1, x=2, x=3, x=4, x=5, x=6, x=7, x=8, x=9, x=10, x=11, x=12, x=13, x=14, x=15, x=16, x=17, x=18, x=19, x=20, x=21, x=22, x=23, x=24, x=25, x=26, x=27, x=28, x=29, x=30, x=40, x=50, provided that the TREM has one or both of the following properties: no more than 15% of the residues are N; or no more than 20 residues are absent.

[1240] In an embodiment, a TREM disclosed herein comprises the sequence of Formula III THR (SEQ ID NO: 612),
[1241] R₀-R₁-R₂-R₃-R₄-R₅-R₆-R₇-R₈-R₉-R₁₀-R₁₁-R₁₂-R₁₃-R₁₄-R₁₅-R₁₆-R₁₇-R₁₈-R₁₉-R₂₀-R₂₁-R₂₂-R₂₃-R₂₄-R₂₅-R₂₆-R₂₇-R₂₈-R₂₉-R₃₀-R₃₁-R₃₂-R₃₃-R₃₄-R₃₅-R₃₆-R₃₇-R₃₈-R₃₉-R₄₀-R₄₁-R₄₂-R₄₃- R₄₄-R₄₅-R₄₆-[R₄₇]ₓ-R₄₈-R₄₉-R₅₀-R₅₁-R₅₂-R₅₃-R₅₄-R₅₅-R₅₆-R₅₇-R₅₈-R₅₉-R₆₀-R₆₁-R₆₂-R₆₃-R₆₄-R₆₅- R₆₆-R₆₇-R₆₈-R₆₉-R₇₀-R₇₁-R₇₂
   wherein R is a ribonucleotide residue and the consensus for Thr is:
[1242] R₀, R₁₈, R₂₃=absent
[1243] R₁₄, R₄₀, R₄₁, R₅₇=are independently A or absent;
[1244] R₄₄=A, C or absent;
[1245] R₀, R₄₂, R₄₈, R₅₆=are independently A, C, G or absent;
[1246] R₄, R₆, R₁₂, R₂₆, R₅₈, R₆₄, R₆₆, R₆₈=are independently N or absent;
[1247] R₁₃, R₂₁, R₃₁, R₃₇, R₄₉, R₆₂=are independently A, C, U or absent;
[1248] R₁, R₁₅, R₂₄, R₂₇, R₂₉, R₄₆, R₅₁, R₆₉=are independently A, G or absent;
[1249] R₇, R₂₅, R₄₅, R₅₀, R₆₃, R₆₇=are independently A, G, U or absent;
[1250] R₅₃=A, U or absent;
[1251] R₃₅=C or absent;
[1252] R₂, R₃₃, R₄₃,R 70=are independently C, G or absent;
[1253] R₅, R₁₆, R₃₄, R₅₉, R₆₅=are independently C, G, U or absent;
[1254] R₃, R₁₁, R₂₂, R₂₈, R₃₀, R₃₆, R₅₅, R₆₀, R₆₁, R₇₁=are independently C, U or absent;
[1255] R₁₀, R₁₉, R₂₀, R₃₈, R₅₂=are independently G or absent;
[1256] R₃₂=G, U or absent;
[1257] R₈, R₁₇, R₃₉, R₅₄, R₇₂=are independently U or absent;
[1258] [R₄₇]ₓ=N or absent;
[1259] wherein, e.g., x=1-271 (e.g., x=1-250, x=1-225, x=1-200, x=1-175, x=1-150, x=1-125, x=1-100, x=1-75, x=1-50, x=1-40, x=1-30, x=1-29, x=1-28, x=1-27, x=1-26, x=1-25, x=1-24, x=1-23, x=1-22, x=1-21, x=1-20, x=1-19, x=1-18, x=1-17, x=1-16, x=1-15, x=1-14, x=1-13, x=1-12, x=1-11, x=1-10, x=10-271, x=20-271, x=30-271, x=40-271, x=50-271, x=60-271, x=70-271, x=80-271, x=100-271, x=125-271, x=150-271, x=175-271, x=200-271, x=225-271, x=1, x=2, x=3, x=4, x=5, x=6, x=7, x=8, x=9, x=10, x=11, x=12, x=13, x=14, x=15, x=16, x=17, x=18, x=19, x=20, x=21, x=22, x=23, x=24, x=25, x=26, x=27, x=28, x=29, x=30, x=40, x=50, x=60, x=70, x=80, x=90, x=100, x=110, x=125, x=150, x=175, x=200, x=225, x=250, or x=271), provided that the TREM has one or both of the following properties: no more than 15% of the residues are N; or no more than 20 residues are absent.

### Tryptophan TREM Consensus Sequence

[1260] In an embodiment, a TREM disclosed herein comprises the sequence of Formula I TRP (SEQ ID NO: 613),
[1261] R₀-R₁-R₂-R₃-R₄-R₅-R₆-R₇-R₈-R₉-R₁₀-R₁₁-R₁₂-R₁₃-R₁₄-R₁₅-R₁₆-R₁₇-R₁₈-R₁₉-R₂₀-R₂₁-R₂₂-R₂₃-R₂₄-R₂₅-R₂₆-R₂₇-R₂₈-R₂₉-R₃₀-R₃₁-R₃₂-R₃₃-R₃₄-R₃₅-R₃₆-R₃₇-R₃₈-R₃₉-R₄₀-R₄₁-R₄₂-R₄₃- R₄₄-R₄₅-R₄₆-[R₄₇]ₓ-R₄₈-R₄₉-R₅₀-R₅₁-R₅₂-R₅₃-R₅₄-R₅₅-R₅₆-R₅₇-R₅₈-R₅₉-R₆₀-R₆₁-R₆₂-R₆₃-R₆₄-R₆₅- R₆₆-R₆₇-R₆₈-R₆₉-R₇₀-R₇₁-R₇₂
   wherein R is a ribonucleotide residue and the consensus for Trp is:
[1262] R₀=absent;
[1263] R₂₄, R₃₉, R₄₁, R₅₇=are independently A or absent;
[1264] R₂, R₃, R₂₆, R₂₇, R₄₀, R₄₈=are independently A, C, G or absent;
[1265] R₄, R₅, R₆, R₂₉, R₃₀, R₃₁, R₃₂, R₃₄, R₄₂, R₄₄, R₄₅, R₄₆, R₄₉, R₅₁, R₅₈, R₆₃, R₆₆, R₆₇, R₆₈=are independently N or absent;
[1266] R₁₃, R₁₄, R₁₆, R₁₈, R₂₁, R₆₁, R₆₅, R₇₁=are independently A, C, U or absent;
[1267] R₁, R₉, R₁₀, R₁₅, R₃₃, R₅₀, R₅₆=are independently A, G or absent;
[1268] R₇, R₂₅, R₇₂=are independently A, G, U or absent;
[1269] R₃₇, R₃₈, R₅₅, R₆₀=are independently C or absent;
[1270] R₁₂, R₃₅, R₄₃, R₆₄, R₆₉, R₇₀=are independently C, G, U or absent;
[1271] R₁₁, R₁₇, R₂₂, R₂₈, R₅₉, R₆₂=are independently C, U or absent;
[1272] R₁₉, R₂₀, R₅₂=are independently G or absent;
[1273] R₈, R₂₃, R₃₆, R₅₃, R₅₄=are independently U or absent;
[1274] [R₄₇]ₓ=N or absent;
[1275] wherein, e.g., x=1-271 (e.g., x=1-250, x=1-225, x=1-200, x=1-175, x=1-150, x=1-125, x=1-100, x=1-75, x=1-50, x=1-40, x=1-30, x=1-29, x=1-28, x=1-27, x=1-26, x=1-25, x=1-24, x=1-23, x=1-22, x=1-21, x=1-20, x=1-19, x=1-18, x=1-17, x=1-16, x=1-15, x=1-14, x=1-13, x=1-12, x=1-11, x=1-10, x=10-271, x=20-271, x=30-271, x=40-271, x=50-271, x=60-271, x=70-271, x=80-271, x=100-271, x=125-271, x=150-271, x=175-271, x=200-271, x=225-271, x=1, x=2, x=3, x=4, x=5, x=6, x=7, x=8, x=9, x=10, x=11, x=12, x=13, x=14, x=15, x=16, x=17, x=18, x=19, x=20, x=21, x=22, x=23, x=24, x=25, x=26, x=27, x=28, x=29, x=30, x=40, x=50, x=60, x=70, x=80, x=90, x=100, x=110, x=125, x=150, x=175, x=200, x=225, x=250, or x=271), provided that the TREM has one or both of the following properties: no more than 15% of the residues are N; or no more than 20 residues are absent.

[1276] In an embodiment, a TREM disclosed herein comprises the sequence of Formula II TRP (SEQ ID NO: 614),
[1277] R₀-R₁-R₂-R₃-R₄-R₅-R₆-R₇-R₈-R₉-R₁₀-R₁₁-R₁₂-R₁₃-R₁₄-R₁₅-R₁₆-R₁₇-R₁₈-R₁₉-R₂₀-R₂₁-R₂₂-R₂₃-R₂₄-R₂₅-R₂₆-R₂₇-R₂₈-R₂₉-R₃₀-R₃₁-R₃₂-R₃₃-R₃₄-R₃₅-R₃₆-R₃₇-R₃₈-R₃₉-R₄₀-R₄₁-R₄₂-R₄₃- R₄₄-R₄₅-R₄₆-[R₄₇]ₓ-R₄₈-R₄₉-R₅₀-R₅₁-R₅₂-R₅₃-R₅₄-R₅₅-R₅₆-R₅₇-R₅₈-R₅₉-R₆₀-R₆₁-R₆₂-R₆₃-R₆₄-R₆₅- R₆₆-R₆₇-R₆₈-R₆₉-R₇₀-R₇₁-R₇₂
   wherein R is a ribonucleotide residue and the consensus for Trp is:
[1278] R₀, R₁₈, R₂₂, R₂₃=absent
[1279] R₁₄, R₂₄, R₃₉, R₄₁, R₅₇, R₇₂=are independently A or absent;
[1280] R₃, R₄, R₁₃, R₆₁, R₇₁=are independently A, C or absent;
[1281] R₆, R₄₄=are independently A, C, G or absent;
[1282] R₂₁=A, C, U or absent;
[1283] R₂, R₇, R₁₅, R₂₅, R₃₃, R₃₄, R₄₅, R₅₆, R₆₃=are independently A, G or absent;
[1284] R₅₈=A, G, U or absent;
[1285] R₄₆=A, U or absent;
[1286] R₃₇, R₃₈, R₅₅, R₆₀, R₆₂=are independently C or absent;
[1287] R₁₂, R₂₆, R₂₇, R₃₅, R₄₀, R₄₈, R₆₇=are independently C, G or absent;
[1288] R₃₂, R₄₃, R₆₈=are independently C, G, U or absent;
[1289] R₁₁, R₁₆, R₂₈, R₃₁, R₄₉, R₅₉, R₆₅, R₇₀=are independently C, U or absent;
[1290] R₁, R₉, R₁₀, R₁₉, R₂₀,R 50, R 52, R₆₉=are independently G or absent;
[1291] R₅, R₈, R₂₉, R₃₀, R₄₂, R₅₁, R₆₄, R₆₆=are independently G, U or absent;
[1292] R₁₇, R₃₆, R₅₃, R₅₄=are independently U or absent;
[1293] [R₄₇]ₓ=N or absent;
[1294] wherein, e.g., x=1-271 (e.g., x=1-250, x=1-225, x=1-200, x=1-175, x=1-150, x=1-125, x=1-100, x=1-75, x=1-50, x=1-40, x=1-30, x=1-29, x=1-28, x=1-27, x=1-26, x=1-25, x=1-24, x=1-23, x=1-22, x=1-21, x=1-20, x=1-19, x=1-18, x=1-17, x=1-16, x=1-15, x=1-14, x=1-13, x=1-12, x=1-11, x=1-10, x=10-271, x=20-271, x=30-271, x=40-271, x=50-271, x=60-271, x=70-271, x=80-271, x=100-271, x=125-271, x=150-271, x=175-271, x=200-271, x=225-271, x=1, x=2, x=3, x=4, x=5, x=6, x=7, x=8, x=9, x=10, x=11, x=12, x=13, x=14, x=15, x=16, x=17, x=18, x=19, x=20, x=21, x=22, x=23, x=24, x=25, x=26, x=27, x=28, x=29, x=30, x=40, x=50, x=60, x=70, x=80, x=90, x=100, x=110, x=125, x=150, x=175, x=200, x=225, x=250, or x=271), provided that the TREM has one or both of the following properties: no more than 15% of the residues are N; or no more than 20 residues are absent.

[1295] In an embodiment, a TREM disclosed herein comprises the sequence of Formula III TRP (SEQ ID NO: 615),
[1296] R₀-R₁-R₂-R₃-R₄-R₅-R₆-R₇-R₈-R₉-R₁₀-R₁₁-R₁₂-R₁₃-R₁₄-R₁₅-R₁₆-R₁₇-R₁₈-R₁₉-R₂₀-R₂₁-R₂₂-R₂₃-R₂₄-R₂₅-R₂₆-R₂₇-R₂₈-R₂₉-R₃₀-R₃₁-R₃₂-R₃₃-R₃₄-R₃₅-R₃₆-R₃₇-R₃₈-R₃₉-R₄₀-R₄₁-R₄₂-R₄₃- R₄₄-R₄₅-R₄₆-[R₄₇]ₓ-R₄₈-R₄₉-R₅₀-R₅₁-R₅₂-R₅₃-R₅₄-R₅₅-R₅₆-R₅₇-R₅₈-R₅₉-R₆₀-R₆₁-R₆₂-R₆₃-R₆₄-R₆₅- R₆₆-R₆₇-R₆₈-R₆₉-R₇₀-R₇₁-R₇₂
   wherein R is a ribonucleotide residue and the consensus for Trp is:
[1297] R₀, R₁₈, R₂₂, R₂₃=absent
[1298] R₁₄, R₂₄, R₃₉, R₄₁, R₅₇, R₇₂=are independently A or absent;
[1299] R₃, R₄, R₁₃, R₆₁, R₇₁=are independently A, C or absent;
[1300] R₆, R₄₄=are independently A, C, G or absent;
[1301] R₂₁=A, C, U or absent;
[1302] R₂, R₇, R₁₅, R₂₅, R₃₃, R₃₄, R₄₅, R₅₆, R₆₃=are independently A, G or absent;
[1303] R₅₈=A, G, U or absent;
[1304] R₄₆=A, U or absent;
[1305] R₃₇, R₃₈, R₅₅, R₆₀, R₆₂=are independently C or absent;
[1306] R₁₂, R₂₆, R₂₇, R₃₅, R₄₀, R₄₈, R₆₇=are independently C, G or absent;
[1307] R₃₂, R₄₃, R₆₈=are independently C, G, U or absent;
[1308] R₁₁, R₁₆, R₂₈, R₃₁, R₄₉, R₅₉, R₆₅, R₇₀=are independently C, U or absent;
[1309] R₁, R₉, R₁₀, R₁₉, R₂₀, R₅₀, R₅₂, R₆₉=are independently G or absent;
[1310] R₅, R₅, R₂₉, R₃₀, R₄₂, R₅₁, R₆₄, R₆₆=are independently G, U or absent;
[1311] R₁₇, R₃₆, R₅₃, R₅₄=are independently U or absent;
[1312] [R₄₇]ₓ=N or absent;
[1313] wherein, e.g., x=1-271 (e.g., x=1-250, x=1-225, x=1-200, x=1-175, x=1-150, x=1-125, x=1-100, x=1-75, x=1-50, x=1-40, x=1-30, x=1-29, x=1-28, x=1-27, x=1-26, x=1-25, x=1-24, x=1-23, x=1-22, x=1-21, x=1-20, x=1-19, x=1-18, x=1-17, x=1-16, x=1-15, x=1-14, x=1-13, x=1-12, x=1-11, x=1-10, x=10-271, x=20-271, x=30-271, x=40-271, x=50-271, x=60-271, x=70-271, x=80-271, x=100-271, x=125-271, x=150-271, x=175-271, x=200-271, x=225-271, x=1, x=2, x=3, x=4, x=5, x=6, x=7, x=8, x=9, x=10, x=11, x=12, x=13, x=14, x=15, x=16, x=17, x=18, x=19, x=20, x=21, x=22, x=23, x=24, x=25, x=26, x=27, x=28, x=29, x=30, x=40, x=50, x=60, x=70, x=80, x=90, x=100, x=110, x=125, x=150, x=175, x=200, x=225, x=250, or x=271), provided that the TREM has one or both of the following properties: no more than 15% of the residues are N; or no more than 20 residues are absent.

### Tyrosine TREM Consensus Sequence

[1314] In an embodiment, a TREM disclosed herein comprises the sequence of Formula I TYR (SEQ ID NO: 616),
[1315] R₀-R₁-R₂-R₃-R₄-R₅-R₆-R₇-R₈-R₉-R₁₀-R₁₁-R₁₂-R₁₃-R₁₄-R₁₅-R₁₆-R₁₇-R₁₈-R₁₉-R₂₀-R₂₁-R₂₂-R₂₃-R₂₄-R₂₅-R₂₆-R₂₇-R₂₈-R₂₉-R₃₀-R₃₁-R₃₂-R₃₃-R₃₄-R₃₅-R₃₆-R₃₇-R₃₈-R₃₉-R₄₀-R₄₁-R₄₂-R₄₃- R₄₄-R₄₅-R₄₆-[R₄₇]ₓ-R₄₈-R₄₉-R₅₀-R₅₁-R₅₂-R₅₃-R₅₄-R₅₅-R₅₆-R₅₇-R₅₈-R₅₉-R₆₀-R₆₁-R₆₂-R₆₃-R₆₄-R₆₅- R₆₆-R₆₇-R₆₈-R₆₉-R₇₀-R₇₁-R₇₂
   wherein R is a ribonucleotide residue and the consensus for Tyr is:
[1316] R₀=absent
[1317] R₁₄, R₃₉, R₅₇=are independently A or absent;
[1318] R₄₁, R₄₈, R₅₁, R₇₁=are independently A, C, G or absent;
[1319] R₃, R₄, R₅, R₆, R₀, R₁₀, R₁₂, R₁₃, R₁₆, R₂₅, R₂₆, R₃₀, R₃₁, R₃₂, R₄₂, R₄₄, R₄₅, R₄₆, R₄₉, R₅₀, R₅₈, R₆₂, R₆₃, R₆₆, R₆₇, R₆₈, R₆₉, R₇₀=are independently N or absent;
[1320] R₂₂, R₆₅=are independently A, C, U or absent;
[1321] R₁₅, R₂₄, R₂₇, R₃₃, R₃₇, R₄₀, R₅₆=are independently A, G or absent;
[1322] R₇, R₂₉, R₃₄, R₇₂=are independently A, G, U or absent;
[1323] R₂₃, R₅₃=are independently A, U or absent;
[1324] R₃₅, R₆₀=are independently C or absent;
[1325] R₂₀=C, G or absent;
[1326] R₁, R₂, R₂₈, R₆₁, R₆₄=are independently C, G, U or absent;
[1327] R₁₁, R₁₇, R₂₁, R₄₃, R₅₅=are independently C, U or absent;
[1328] R₁₉, R₅₂=are independently G or absent;
[1329] R₈, R₁₈, R₃₆, R₃₈, R₅₄, R₅₉=are independently U or absent;
[1330] [R₄₇]ₓ=N or absent;
[1331] wherein, e.g., x=1-271 (e.g., x=1-250, x=1-225, x=1-200, x=1-175, x=1-150, x=1-125, x=1-100, x=1-75, x=1-50, x=1-40, x=1-30, x=1-29, x=1-28, x=1-27, x=1-26, x=1-25, x=1-24, x=1-23, x=1-22, x=1-21, x=1-20, x=1-19, x=1-18, x=1-17, x=1-16, x=1-15, x=1-14, x=1-13, x=1-12, x=1-11, x=1-10, x=10-271, x=20-271, x=30-271, x=40-271, x=50-271, x=60-271, x=70-271, x=80-271, x=100-271, x=125-271, x=150-271, x=175-271, x=200-271, x=225-271, x=1, x=2, x=3, x=4, x=5, x=6, x=7, x=8, x=9, x=10, x=11, x=12, x=13, x=14, x=15, x=16, x=17, x=18, x=19, x=20, x=21, x=22, x=23, x=24, x=25, x=26, x=27, x=28, x=29, x=30, x=40, x=50, x=60, x=70, x=80, x=90, x=100, x=110, x=125, x=150, x=175, x=200, x=225, x=250, or x=271), provided that the TREM has one or both of the following properties: no more than 15% of the residues are N; or no more than 20 residues are absent.

[1332] In an embodiment, a TREM disclosed herein comprises the sequence of Formula II TYR (SEQ ID NO: 617),
[1333] R₀-R₁-R₂-R₃-R₄-R₅-R₆-R₇-R₈-R₉-R₁₀-R₁₁-R₁₂-R₁₃-R₁₄-R₁₅-R₁₆-R₁₇-R₁₈-R₁₉-R₂₀-R₂₁-R 22-R₂₃-R₂₄-R₂₅-R₂₆-R₂₇-R₂₈-R₂₉-R₃₀-R₃₁-R₃₂-R₃₃-R₃₄-R₃₅-R₃₆-R₃₇-R₃₈-R₃₉-R₄₀-R₄₁-R₄₂-R₄₃- R₄₄-R₄₅-R₄₆-[R₄₇]ₓ-R₄₈-R₄₉-R₅₀-R₅₁-R₅₂-R₅₃-R₅₄-R₅₅-R₅₆-R₅₇-R₅₈-R₅₉-R₆₀-R₆₁-R₆₂-R₆₃-R₆₄-R₆₅- R₆₆-R₆₇-R₆₈-R₆₉-R₇₀-R₇₁-R₇₂
   wherein R is a ribonucleotide residue and the consensus for Tyr is:
[1334] R₀, R₁₈, R₂₃=absent
[1335] R₇, R₉, R₁₄, R₂₄, R₂₆, R₃₄, R₃₉, R₅₇=are independently A or absent;
[1336] R₄₄, R₆₉=are independently A, C or absent;
[1337] R₇₁=A, C, G or absent;
[1338] R₆₈=N or absent;
[1339] R₅₈=A, C, U or absent;
[1340] R₃₃, R₃₇, R₄₁, R₅₆, R₆₂, R₆₃=are independently A, G or absent;
[1341] R₆, R₂₉, R₇₂=are independently A, G, U or absent;
[1342] R₃₁, R₄₅, R₅₃=are independently A, U or absent;
[1343] R₁₃, R₃₅, R₄₉, R₆₀=are independently C or absent;
[1344] R₂₀, R₄₈, R₆₄, R₆₇, R₇₀=are independently C, G or absent;
[1345] R₁, R₂, R₅, R₁₆, R₆₆=are independently C, G, U or absent;
[1346] R₁₁, R₂₁, R₂₈, R₄₃, R₅₅, R₆₁=are independently C, U or absent;
[1347] R₁₀, R₁₅, R₁₉, R₂₅, R₂₇, R₄₀, R₅₁, R₅₂=are independently G or absent;
[1348] R₃, R₄, R₃₀, R₃₂, R₄₂, R₄₆=are independently G, U or absent;
[1349] R₈, R₁₂, R₁₇, R₂₂, R₃₆, R₃₈, R₅₀, R₅₄, R₅₉, R₆₅=are independently U or absent;
[1350] [R₄₇]ₓ=N or absent;
[1351] wherein, e.g., x=1-271 (e.g., x=1-250, x=1-225, x=1-200, x=1-175, x=1-150, x=1-125, x=1-100, x=1-75, x=1-50, x=1-40, x=1-30, x=1-29, x=1-28, x=1-27, x=1-26, x=1-25, x=1-24, x=1-23, x=1-22, x=1-21, x=1-20, x=1-19, x=1-18, x=1-17, x=1-16, x=1-15, x=1-14, x=1-13, x=1-12, x=1-11, x=1-10, x=10-271, x=20-271, x=30-271, x=40-271, x=50-271, x=60-271, x=70-271, x=80-271, x=100-271, x=125-271, x=150-271, x=175-271, x=200-271, x=225-271, x=1, x=2, x=3, x=4, x=5, x=6, x=7, x=8, x=9, x=10, x=11, x=12, x=13, x=14, x=15, x=16, x=17, x=18, x=19, x=20, x=21, x=22, x=23, x=24, x=25, x=26, x=27, x=28, x=29, x=30, x=40, x=50, x=60, x=70, x=80, x=90, x=100, x=110, x=125, x=150, x=175, x=200, x=225, x=250, or x=271), provided that the TREM has one or both of the following properties: no more than 15% of the residues are N; or no more than 20 residues are absent.

[1352] In an embodiment, a TREM disclosed herein comprises the sequence of Formula III TYR (SEQ ID NO: 618),
[1353] R₀-R₁-R₂-R₃-R₄-R₅-R₆-R₇-R₈-R₉-R₁₀-R₁₁-R₁₂-R₁₃-R₁₄-R₁₅-R₁₆-R₁₇-R₁₈-R₁₉-R₂₀-R₂₁-R₂₂-R₂₃-R₂₄-R₂₅-R₂₆-R₂₇-R₂₈-R₂₉-R₃₀-R₃₁-R₃₂-R₃₃-R₃₄-R₃₅-R₃₆-R₃₇-R₃₈-R₃₉-R₄₀-R₄₁-R₄₂-R₄₃- R₄₄-R₄₅-R₄₆-[R₄₇]ₓ-R₄₈-R₄₉-R₅₀-R₅₁-R₅₂-R₅₃-R₅₄-R₅₅-R₅₆-R₅₇-R₅₈-R₅₉-R₆₀-R₆₁-R₆₂-R₆₃-R₆₄-R₆₅- R₆₆-R₆₇-R₆₈-R₆₉-R₇₀-R₇₁-R₇₂
   wherein R is a ribonucleotide residue and the consensus for Tyr is:
[1354] R₀, R₁₈, R₂₃=absent
[1355] R₇, R₉, R₁₄, R₂₄, R₂₆, R₃₄, R₃₉, R₅₇, R₇₂=are independently A or absent;
[1356] R₄₄, R₆₉=are independently A, C or absent;
[1357] R₇₁=A, C, G or absent;
[1358] R₃₇, R₄₁, R₅₆, R₆₂, R₆₃=are independently A, G or absent;
[1359] R₆, R₂₉, R₆₈=are independently A, G, U or absent;
[1360] R₃₁, R₄₅, R₅₈=are independently A, U or absent;
[1361] R₁₃, R₂₈, R₃₅, R₄₉, R₆₀, R₆₁=are independently C or absent;
[1362] R₅, R₄₈, R₆₄, R₆₇, R₇₀=are independently C, G or absent;
[1363] R₁, R₂=are independently C, G, U or absent;
[1364] R₁₁, R₁₆, R₂₁, R₄₃, R₅₅, R₆₆=are independently C, U or absent;
[1365] R₁₀, R₁₅, R₁₉, R₂₀, R₂₅, R₂₇, R₃₃, R₄₀, R₅₁, R₅₂=are independently G or absent;
[1366] R₃, R₄, R₃₀, R₃₂, R₄₂, R₄₆=are independently G, U or absent;
[1367] R₈, R₁₂, R₁₇, R₂₂, R₃₆, R₃₈, R₅₀, R₅₃, R₅₄, R₅₉, R₆₅=are independently U or absent;
[1368] [R₄₇]ₓ=N or absent;
[1369] wherein, e.g., x=1-271 (e.g., x=1-250, x=1-225, x=1-200, x=1-175, x=1-150, x=1-125, x=1-100, x=1-75, x=1-50, x=1-40, x=1-30, x=1-29, x=1-28, x=1-27, x=1-26, x=1-25, x=1-24, x=1-23, x=1-22, x=1-21, x=1-20, x=1-19, x=1-18, x=1-17, x=1-16, x=1-15, x=1-14, x=1-13, x=1-12, x=1-11, x=1-10, x=10-271, x=20-271, x=30-271, x=40-271, x=50-271, x=60-271, x=70-271, x=80-271, x=100-271, x=125-271, x=150-271, x=175-271, x=200-271, x=225-271, x=1, x=2, x=3, x=4, x=5, x=6, x=7, x=8, x=9, x=10, x=11, x=12, x=13, x=14, x=15, x=16, x=17, x=18, x=19, x=20, x=21, x=22, x=23, x=24, x=25, x=26, x=27, x=28, x=29, x=30, x=40, x=50, provided that the TREM has one or both of the following properties: no more than 15% of the residues are N; or no more than 20 residues are absent.

### Valine TREM Consensus Sequence

[1370] In an embodiment, a TREM disclosed herein comprises the sequence of Formula I VAL (SEQ ID NO: 619),
[1371] R₀-R₁-R₂-R₃-R₄-R₅-R₆-R₇-R₈-R₉-R₁₀-R₁₁-R₁₂-R₁₃-R₁₄-R₁₅-R₁₆-R₁₇-R₁₈-R₁₉-R₂₀-R₂₁-R₂₂-R₂₃-R₂₄-R₂₅-R₂₆-R₂₇-R₂₈-R₂₉-R₃₀-R₃₁-R₃₂-R₃₃-R₃₄-R₃₅-R₃₆-R₃₇-R₃₈-R₃₉-R₄₀-R₄₁-R₄₂-R₄₃- R₄₄-R₄₅-R₄₆-[R₄₇]ₓ-R₄₈-R₄₉-R₅₀-R₅₁-R₅₂-R₅₃-R₅₄-R₅₅-R₅₆-R₅₇-R₅₈-R₅₉-R₆₀-R₆₁-R₆₂-R₆₃-R₆₄-R₆₅- R₆₆-R₆₇-R₆₈-R₆₉-R₇₀-R₇₁-R₇₂
   wherein R is a ribonucleotide residue and the consensus for Val is:
[1372] R₀, R₂₃=absent;
[1373] R₂₄, R₃₈, R₅₇=are independently A or absent;
[1374] R₉, R₇₂=are independently A, C, G or absent;
[1375] R₂, R₄, R₅, R₆, R₇, R₁₂, R₁₅, R₁₆, R₂₁, R₂₅, R₂₆, R₂₉, R₃₁, R₃₂, R₃₃, R₃₄, R₃₇, R₄₁, R₄₂, R₄₃, R₄₄, R₄₅, R₄₆, R₄₈, R₄₉, R₅₀, R₅₈, R₆₁, R₆₂, R₆₃, R₆₄, R₆₅, R₆₆, R₆₇, R₆₈, R₆₉, R₇₀=are independently N or absent;
[1376] R₁₇, R₃₅, R₅₉=are independently A, C, U or absent;
[1377] R₁₀, R₁₄, R₂₇, R₄₀, R₅₂, R₅₆=are independently A, G or absent;
[1378] R₁, R₃, R₅₁, R₅₃=are independently A, G, U or absent;
[1379] R₃₉=C or absent;
[1380] R₁₃, R₃₀, R₅₅=are independently C, G, U or absent;
[1381] R₁₁, R₂₂, R₂₈, R₆₀, R₇₁=are independently C, U or absent;
[1382] R₁₉=G or absent;
[1383] R₂₀=G, U or absent;
[1384] R₈, R₁₈, R₃₆, R₅₄=are independently U or absent;
[1385] [R₄₇]ₓ=N or absent;
[1386] wherein, e.g., x=1-271 (e.g., x=1-250, x=1-225, x=1-200, x=1-175, x=1-150, x=1-125, x=1-100, x=1-75, x=1-50, x=1-40, x=1-30, x=1-29, x=1-28, x=1-27, x=1-26, x=1-25, x=1-24, x=1-23, x=1-22, x=1-21, x=1-20, x=1-19, x=1-18, x=1-17, x=1-16, x=1-15, x=1-14, x=1-13, 271, x=80-271, x=100-271, x=125-271, x=150-271, x=175-271, x=200-271, x=225-271, x=1, x=2, x=3, x=4, x=5, x=6, x=7, x=8, x=9, x=10, x=11, x=12, x=13, x=14, x=15, x=16, x=17, x=18, x=19, x=20, x=21, x=22, x=23, x=24, x=25, x=26, x=27, x=28, x=29, x=30, x=40, x=50, x=60, x=70, x=80, x=90, x=100, x=110, x=125, x=150, x=175, x=200, x=225, x=250, or x=271), provided that the TREM has one or both of the following properties: no more than 15% of the residues are N; or no more than 20 residues are absent.

[1387] In an embodiment, a TREM disclosed herein comprises the sequence of Formula II VAL (SEQ ID NO: 620),
[1388] R₀-R₁-R₂-R₃-R₄-R₅-R₆-R₇-R₈-R₉-R₁₀-R₁₁-R₁₂-R₁₃-R₁₄-R₁₅-R₁₆-R₁₇-R₁₈-R₁₉-R₂₀-R₂₁-R₂₂-R₂₃-R₂₄-R₂₅-R₂₆-R₂₇-R₂₈-R₂₉-R₃₀-R₃₁-R₃₂-R₃₃-R₃₄-R₃₅-R₃₆-R₃₇-R₃₈-R₃₉-R₄₀-R₄₁-R₄₂-R₄₃- R₄₄-R₄₅-R₄₆-[R₄₇]ₓ-R₄₈-R₄₉-R₅₀-R₅₁-R₅₂-R₅₃-R₅₄-R₅₅-R₅₆-R₅₇-R₅₈-R₅₉-R₆₀-R₆₁-R₆₂-R₆₃-R₆₄-R₆₅- R₆₆-R₆₇-R₆₈-R₆₉-R₇₀-R₇₁-R₇₂
   wherein R is a ribonucleotide residue and the consensus for Val is:
[1389] R₀, R₁₈, R₂₃=absent;
[1390] R₂₄, R₃₈, R₅₇=are independently A or absent;
[1391] R₆₄, R₇₀, R₇₂=are independently A, C, G or absent;
[1392] R₁₅, R₁₆, R₂₆, R₂₉, R₃₁, R₃₂, R₄₃, R₄₄, R₄₅, R₄₉, R₅₀, R₅₈, R₆₂, R₆₅=are independently N or absent;
[1393] R₆, R₁₇, R₃₄, R₃₇, R₄₁, R₅₉=are independently A, C, U or absent;
[1394] R₉, R₁₀, R₁₄, R₂₇, R₄₀, R₄₆, R₅₁, R₅₂, R₅₆=are independently A, G or absent;
[1395] R₇, R₁₂, R₂₅, R₃₃, R₅₃, R₆₃, R₆₆, R₆₈=are independently A, G, U or absent;
[1396] R₆₉=A, U or absent;
[1397] R₃₉=C or absent;
[1398] R₅, R₆₇=are independently C, G or absent;
[1399] R₂, R₄, R₁₃, R₄₈, R₅₅, R₆₁=are independently C, G, U or absent;
[1400] R₁₁, R₂₂, R₂₈, R₃₀, R₃₅, R₆₀, R₇₁=are independently C, U or absent;
[1401] R₁₉=G or absent;
[1402] R₁, R₃, R₂₀, R₄₂=are independently G, U or absent;
[1403] R₈, R₂₁, R₃₆, R₅₄=are independently U or absent;
[1404] [R₄₇]ₓ=N or absent;
[1405] wherein, e.g., x=1-271 (e.g., x=1-250, x=1-225, x=1-200, x=1-175, x=1-150, x=1-125, x=1-100, x=1-75, x=1-50, x=1-40, x=1-30, x=1-29, x=1-28, x=1-27, x=1-26, x=1-25, x=1-24, x=1-23, x=1-22, x=1-21, x=1-20, x=1-19, x=1-18, x=1-17, x=1-16, x=1-15, x=1-14, x=1-13, x=1-12, x=1-11, x=1-10, x=10-271, x=20-271, x=30-271, x=40-271, x=50-271, x=60-271, x=70-271, x=80-271, x=100-271, x=125-271, x=150-271, x=175-271, x=200-271, x=225-271, x=1, x=2, x=3, x=4, x=5, x=6, x=7, x=8, x=9, x=10, x=11, x=12, x=13, x=14, x=15, x=16, x=17, x=18, x=19, x=20, x=21, x=22, x=23, x=24, x=25, x=26, x=27, x=28, x=29, x=30, x=40, x=50, x=60, x=70, x=80, x=90, x=100, x=110, x=125, x=150, x=175, x=200, x=225, x=250, or x=271), provided that the TREM has one or both of the following properties: no more than 15% of the residues are N; or no more than 20 residues are absent.

[1406] In an embodiment, a TREM disclosed herein comprises the sequence of Formula III VAL (SEQ ID NO: 621),
[1407] R₀-R₁-R₂-R₃-R₄-R₅-R₆-R₇-R₈-R₉-R₁₀-R₁₁-R₁₂-R₁₃-R₁₄-R₁₅-R₁₆-R₁₇-R₁₈-R₁₉-R₂₀-R₂₁-R₂₂-R₂₃-R₂₄-R₂₅-R₂₆-R₂₇-R₂₈-R₂₉-R₃₀-R₃₁-R₃₂-R₃₃-R₃₄-R₃₅-R₃₆-R₃₇-R₃₈-R₃₉-R₄₀-R₄₁-R₄₂-R₄₃- R₄₄-R₄₅-R₄₆-[R₄₇]ₓ-R₄₈-R₄₉-R₅₀-R₅₁-R₅₂-R₅₃-R₅₄-R₅₅-R₅₆-R₅₇-R₅₈-R₅₉-R₆₀-R₆₁-R₆₂-R₆₃-R₆₄-R₆₅- R₆₆-R₆₇-R₆₈-R₆₉-R₇₀-R₇₁-R₇₂
   wherein R is a ribonucleotide residue and the consensus for Val is:
[1408] R₀, R₁₈, R₂₃=absent
[1409] R₂₄, R₃₈, R₄₀, R₅₇, R₇₂=are independently A or absent;
[1410] R₂₉, R₆₄, R₇₀=are independently A, C, G or absent;
[1411] R₄₉, R₅₀, R₆₂=are independently N or absent;
[1412] R₁₆, R₂₆, R₃₁, R₃₂, R₃₇, R₄₁, R₄₃, R₅₉, R₆₅=are independently A, C, U or absent;
[1413] R₉, R₁₄, R₂₇, R₄₆, R₅₂, R₅₆, R₆₆=are independently A, G or absent;
[1414] R₇, R₁₂, R₂₅, R₃₃, R₄₄, R₄₅, R₅₃, R₅₈, R₆₃, R₆₈=are independently A, G, U or absent;
[1415] R₆₉=A, U or absent;
[1416] R₃₉=C or absent;
[1417] R₅, R₆₇=are independently C, G or absent;
[1418] R₂, R₄, R₁₃, R₁₅, R₄₈, R₅₅=are independently C, G, U or absent;
[1419] R₆, R₁₁, R₂₂, R₂₈, R₃₀, R₃₄, R₃₅, R₆₀, R₆₁, R₇₁=are independently C, U or absent;
[1420] R₁₀, R₁₉, R₅₁=are independently G or absent;
[1421] R₁, R₃, R₂₀, R₄₂=are independently G, U or absent;
[1422] R₈, R₁₇, R₂₁, R₃₆, R₅₄=are independently U or absent;
[1423] [R₄₇]ₓ=N or absent;
[1424] wherein, e.g., x=1-271 (e.g., x=1-250, x=1-225, x=1-200, x=1-175, x=1-150, x=1-125, x=1-100, x=1-75, x=1-50, x=1-40, x=1-30, x=1-29, x=1-28, x=1-27, x=1-26, x=1-25, x=1-24, x=1-23, x=1-22, x=1-21, x=1-20, x=1-19, x=1-18, x=1-17, x=1-16, x=1-15, x=1-14, x=1-13, x=1-12, x=1-11, x=1-10, x=10-271, x=20-271, x=30-271, x=40-271, x=50-271, x=60-271, x=70-271, x=80-271, x=100-271, x=125-271, x=150-271, x=175-271, x=200-271, x=225-271, x=1, x=2, x=3, x=4, x=5, x=6, x=7, x=8, x=9, x=10, x=11, x=12, x=13, x=14, x=15, x=16, x=17, x=18, x=19, x=20, x=21, x=22, x=23, x=24, x=25, x=26, x=27, x=28, x=29, x=30, x=40, x=50, x=60, x=70, x=80, x=90, x=100, x=110, x=125, x=150, x=175, x=200, x=225, x=250, or x=271), provided that the TREM has one or both of the following properties: no more than 15% of the residues are N; or no more than 20 residues are absent.

### Variable Region Consensus Sequence

[1425] In an embodiment, a TREM disclosed herein comprises a variable region at position R₄₇. In an embodiment, the variable region is 1-271 ribonucleotides in length (e.g. 1-250, 1-225, 1-200, 1-175, 1-150, 1-125, 1-100, 1-75, 1-50, 1-40, 1-30, 1-29, 1-28, 1-27, 1-26, 1-25, 1-24, 1-23, 1-22, 1-21, 1-20, 1-19, 1-18, 1-17, 1-16, 1-15, 1-14, 1-13, 1-12, 1-11, 1-10, 10-271, 20-271, 30-271, 40-271, 50-271, 60-271, 70-271, 80-271, 100-271, 125-271, 150-271, 175-271, 200-271, 225-271, 1, 2, 3, 4, 5, 6, 7, 8, 9, 10, 11, 12, 13, 14, 15, 16, 17, 18, 19, 20, 21, 22, 23, 24, 25, 26, 27, 28, 29, 30, 40, 50, 60, 70, 80, 90, 100, 110, 125, 150, 175, 200, 225, 250, or 271 ribonucleotides). In an embodiment, the variable region comprises any one, all or a combination of Adenine, Cytosine, Guanine or Uracil.

[1426] In an embodiment, the variable region comprises a ribonucleic acid (RNA) sequence encoded by a deoxyribonucleic acid (DNA) sequence disclosed in Table 4, e.g., any one of SEQ ID NOs: 452-561 disclosed in Table 4.

TABLE 4
Exemplary variable region sequences.

| | SEQ ID NO | SEQUENCE |
|---|---|---|
| 1 | 452 | AAAATATAAATATATTTC |
| 2 | 453 | AAGCT |
| 3 | 454 | AAGTT |
| 4 | 455 | AATTCTTCGGAATGT |
| 5 | 456 | AGA |
| 6 | 457 | AGTCC |
| 7 | 458 | CAACC |
| 8 | 459 | CAATC |
| 9 | 460 | CAGC |
| 10 | 461 | CAGGCGGGTTCTGCCCGCGC |
| 11 | 462 | CATACCTGCAAGGGTATC |
| 12 | 463 | CGACCGCAAGGTTGT |
| 13 | 464 | CGACCTTGCGGTCAT |
| 14 | 465 | CGATGCTAATCACATCGT |
| 15 | 466 | CGATGGTGACATCAT |
| 16 | 467 | CGATGGTTTACATCGT |
| 17 | 468 | CGCCGTAAGGTGT |
| 18 | 469 | CGCCTTAGGTGT |
| 19 | 470 | CGCCTTTCGACGCGT |
| 20 | 471 | CGCTTCACGGCGT |
| 21 | 472 | CGGCAGCAATGCTGT |
| 22 | 473 | CGGCTCCGCCTTC |
| 23 | 474 | CGGGTATCACAGGGTC |
| 24 | 475 | CGGTGCGCAAGCGCTGT |
| 25 | 476 | CGTACGGGTGACCGTACC |
| 26 | 477 | CGTCAAAGACTTC |
| 27 | 478 | CGTCGTAAGACTT |
| 28 | 479 | CGTTGAATAAACGT |
| 29 | 480 | CTGTC |
| 30 | 481 | GGCC |
| 31 | 482 | GGGGATT |
| 32 | 483 | GGTC |
| 33 | 484 | GGTTT |
| 34 | 485 | GTAG |
| 35 | 486 | TAACTAGATACTTTCAGAT |
| 36 | 487 | TACTCGTATGGGTGC |
| 37 | 488 | TACTTTGCGGTGT |
| 38 | 489 | TAGGCGAGTAACATCGTGC |
| 39 | 490 | TAGGCGTGAATAGCGCCTC |
| 40 | 491 | TAGGTCGCGAGAGCGGCGC |
| 41 | 492 | TAGGTCGCGTAAGCGGCGC |
| 42 | 493 | TAGGTGGTTATCCACGC |
| 43 | 494 | TAGTC |
| 44 | 495 | TAGTT |
| 45 | 496 | TATACGTGAAAGCGTATC |
| 46 | 497 | TATAGGGTCAAAAACTCTATC |
| 47 | 498 | TATGCAGAAATACCTGCATC |
| 48 | 499 | TCCCCATACGGGGGC |
| 49 | 500 | TCCCGAAGGGGTTC |
| 50 | 501 | TCTACGTATGTGGGC |
| 51 | 502 | TCTCATAGGAGTTC |
| 52 | 503 | TCTCCTCTGGAGGC |
| 53 | 504 | TCTTAGCAATAAGGT |
| 54 | 505 | TCTTGTAGGAGTTC |
| 55 | 506 | TGAACGTAAGTTCGC |
| 56 | 507 | TGAACTGCGAGGTTCC |
| 57 | 508 | TGAC |
| 58 | 509 | TGACCGAAAGGTCGT |
| 59 | 510 | TGACCGCAAGGTCGT |
| 60 | 511 | TGAGCTCTGCTCTC |
| 61 | 512 | TGAGGCCTCACGGCCTAC |
| 62 | 513 | TGAGGGCAACTTCGT |
| 63 | 514 | TGAGGGTCATACCTCC |
| 64 | 515 | TGAGGGTGCAAATCCTCC |
| 65 | 516 | TGCCGAAAGGCGT |
| 66 | 517 | TGCCGTAAGGCGT |
| 67 | 518 | TGCGGTCTCCGCGC |
| 68 | 519 | TGCTAGAGCAT |
| 69 | 520 | TGCTCGTATAGAGCTC |
| 70 | 521 | TGGACAATTGTCTGC |
| 71 | 522 | TGGACAGATGTCCGT |
| 72 | 523 | TGGACAGGTGTCCGC |
| 73 | 524 | TGGACGGTTGTCCGC |
| 74 | 525 | TGGACTTGTGGTC |
| 75 | 526 | TGGAGATTCTCTCCGC |
| 76 | 527 | TGGCATAGGCCTGC |
| 77 | 528 | TGGCTTATGTCTAC |
| 78 | 529 | TGGGAGTTAATCCCGT |
| 79 | 530 | TGGGATCTTCCCGC |
| 80 | 531 | TGGGCAGAAATGTCTC |
| 81 | 532 | TGGGCGTTCGCCCGC |
| 82 | 533 | TGGGCTTCGCCCGC |
| 83 | 534 | TGGGGGATAACCCCGT |
| 84 | 535 | TGGGGGTTTCCCCGT |
| 85 | 536 | TGGT |
| 86 | 537 | TGGTGGCAACACCGT |
| 87 | 538 | TGGTTTATAGCCGT |
| 88 | 539 | TGTACGGTAATACCGTACC |
| 89 | 540 | TGTCCGCAAGGACGT |
| 90 | 541 | TGTCCTAACGGACGT |
| 91 | 542 | TGTCCTATTAACGGACGT |
| 92 | 543 | TGTCCTTCACGGGCGT |
| 93 | 544 | TGTCTTAGGACGT |
| 94 | 545 | TGTGCGTTAACGCGTACC |
| 95 | 546 | TGTGTCGCAAGGCACC |
| 96 | 547 | TGTTCGTAAGGACTT |
| 97 | 548 | TTCACAGAAATGTGTC |
| 98 | 549 | TTCCCTCGTGGAGT |
| 99 | 550 | TTCCCTCTGGGAGC |
| 100 | 551 | TTCCCTTGTGGATC |
| 101 | 552 | TTCCTTCGGGAGC |
| 102 | 553 | TTCTAGCAATAGAGT |
| 103 | 554 | TTCTCCACTGGGGAGC |
| 104 | 555 | TTCTCGAGAGGGAGC |
| 105 | 556 | TTCTCGTATGAGAGC |
| 106 | 557 | TTTAAGGTTTTCCCTTAAC |
| 107 | 558 | TTTCATTGTGGAGT |
| 108 | 559 | TTTCGAAGGAATCC |
| 109 | 560 | TTTCTTCGGAAGC |
| 110 | 561 | TTTGGGGCAACTCAAC |

### Corresponding Nucleotide Positions

[1427] To determine if a selected nucleotide position in a candidate sequence corresponds to a selected position in a reference sequence (e.g., SEQ ID NO: 622, SEQ ID NO: 623, SEQ ID NO: 624), one or more of the following Evaluations is performed.

### Evaluation A:

[1428] 1. The candidate sequence is aligned with each of the consensus sequences in Tables 9 and 10. The consensus sequence(s) having the most positions aligned (and which has at least 60% of the positions of the candidate sequence aligned) is selected.

[1429] The alignment is performed as is follows. The candidate sequence and an isodecoder consensus sequence from Tables 10A-10B are aligned based on a global pairwise alignment calculated with the Needleman-Wunsch algorithm when run with match scores from Table 11, a mismatch penalty of −1, a gap opening penalty of −1, and a gap extension penalty of −0.5, and no penalty for end gaps. The alignment with the highest overall alignment score is then used to determine the percent similarity between the candidate and the consensus sequence by counting the number of matched positions in the alignment, dividing it by the larger of the number of non-N bases in the candidate sequence or the consensus sequence, and multiplying the result by 100. In cases where multiple alignments (of the candidate and a single consensus sequence) tie for the same score, the percent similarity is the largest percent similarity calculated from the tied alignments. This process is repeated for the candidate sequence with each of the remaining isodecoder consensus sequences in Tables 10A-10B, and the alignment resulting in the greatest percent similarity is selected. If this alignment has a percent similarity equal to or greater than 60%, it is considered a valid alignment and used to relate positions in the candidate sequence to those in the consensus sequence, otherwise the candidate sequence is considered to have not aligned to any of the isodecoder consensus sequences. If there is a tie at this point, all tied consensus sequences are taken forward to step 2 in the analysis.
[1430] 2. Using the selected consensus sequence(s) from step 1, one determines the consensus sequence position number that aligns with the selected position (e.g., a modified position) in the candidate sequence. One then assigns the position number of the aligned position in the consensus sequence to the selected position in the candidate sequence, in other words, the selected position in the candidate sequence is numbered according to the numbering of the consensus sequence. If there were tied consensus sequences from step one, and they give different position numbers in this step 2, then all such position numbers are taken forward to step 5.
[1431] 3. The reference sequence is aligned with the consensus sequence chosen in step 1. The alignment is performed as described in step 1.
[1432] 4. From the alignment in step 3, one determines the consensus sequence position number that aligns with the selected position (e.g., a modified position) in the reference sequence. One then assigns the position number of the aligned position in the consensus sequence to the selected position in the reference sequence, in other words, the selected position in the reference sequence is numbered according to the numbering of the consensus sequence. If there is a tie at this point, all tied consensus sequences are taken forward to step 5 in the analysis.
[1433] 5. If a value for a position number determined for the reference sequence in step 2 is the same as the value for the position number determined for the candidate sequence in step 4, the positions are defined as corresponding.

### Evaluation B:

[1434] The reference sequence (e.g., a TREM sequence described herein) and the candidate sequence are aligned with one another. The alignment is performed as follows.

[1435] The reference sequence and the candidate sequence are aligned based on a global pairwise alignment calculated with the Needleman-Wunsch algorithm when run with match scores from Table 11, a mismatch penalty of −1, a gap opening penalty of −1, and a gap extension penalty of −0.5, and no penalty for end gaps. The alignment with the highest overall alignment score is then used to determine the percent similarity between the candidate and reference sequence by counting the number of matched based in the alignment, dividing it by the larger of the number of non-N bases in the candidate or reference sequence, and multiplying the result by 100. In cases where multiple alignments tie for the same score, the percent similarity is the largest percent similarity calculated from the tied alignments. If this alignment has a percent similarity equal to or greater than 60%, it is considered a valid alignment and used to relate positions in the candidate sequence to those in the reference sequence, otherwise the candidate sequence is considered to have not aligned to the reference sequence.

[1436] If the selected nucleotide position in the reference sequence (e.g., a modified position) is paired with a selected nucleotide position (e.g., a modified position) in the candidate sequence, the positions are defined as corresponding.

### Evaluation C:

[1437] The candidate sequence is assigned a nucleotide position number according to the comprehensive tRNA numbering system (CtNS), also referred to as the tRNAviz method (e.g., as described in Lin et al., Nucleic Acids Research, 47:W1, pages W542-W547, 2 Jul. 2019), which serves as a global numbering system for tRNA molecules. The alignment is performed as follows.
[1438] 1. The candidate sequence is assigned a nucleotide position according to the tRNAviz method. For a novel sequence not present in the tRNAviz database, the numbering for the closest sequence in the database is obtained. For example, if a TREM differs at any given nucleotide position from a sequence in the database, the numbering for the tRNA having the wildtype sequence at said given nucleotide position is used.
[1439] 2. The reference sequence is assigned a nucleotide position according to the method described in 1.
[1440] 3. If a value for a position number determined for the reference sequence in step 1 is the same as the value for the position number determined for the candidate sequence in step 2, the positions are defined as corresponding.

[1441] If the selected position in the reference sequence and the candidate sequence are found to be corresponding in at least one of Evaluations A, B, and C, the positions correspond. For example, if two positions are found to be corresponding under Evaluation A, but do not correspond under Evaluation B or Evaluation C, the positions are defined as corresponding. Similarly, if two positions are found to be corresponding under Evaluation B, but do not correspond under Evaluation A or Evaluation C, the positions are defined as corresponding. In addition, if two positions are found to be corresponding under Evaluation C, but do not correspond under Evaluation A or Evaluation B, the positions are defined as corresponding

[1442] The numbering given above is used for ease of presentation and does not imply a required sequence. If more than one Evaluation is performed, they can be performed in any order.

TABLE 10A
Consensus sequence computationally generated
for each isodecoder by aligning
members of the isodecoder family

| SEQ | | | |
|---|---|---|---|
| ID | Amino | Anti- | |
| NO. | Acid | codon | Consensus sequence |
| 1200 | Ala | AGC | GGGGAATTAGCTCAAGTGGTAGAGCGCTTG |
| | | | CTTAGCATGCAAGAGGTAGTGGGATCGATG |
| | | | CCCACATTCTCCA |
| 1201 | Ala | CGC | GGGGATGTAGCTCAGTGGTAGAGCGCATGC |
| | | | TTCGCATGTATGAGGTCCCGGGTTCGATCCC |
| | | | CGGCATCTCCA |
| 1202 | Ala | TGC | GGGGGTGTAGCTCAGTGGTAGAGCGCATGC |
| | | | TTTGCATGTATGAGGCCCCGGGTTCGATCCC |
| | | | CGGCACCTCCA |
| 1203 | Arg | ACG | GGGCCAGTGGCGCAATGGATAACGCGTCTG |
| | | | ACTACGGATCAGAAGATTCCAGGTTCGACTC |
| | | | CTGGCTGGCTCG |
| 1204 | Arg | CCG | GGCCGCGTGGCCTAATGGATAAGGCGTCTG |
| | | | ATTCCGGATCAGAAGATTGAGGGTTCGAGTC |
| | | | CCTTCGTGGTCG |
| 1205 | Arg | CCT | GCCCCAGTGGCCTAATGGATAAGGCACTGG |
| | | | CCTCCTAAGCCAGGGATTGTGGGTTCGAGTC |
| | | | CCACCTGGGGTA |
| 1206 | Arg | TCG | GACCGCGTGGCCTAATGGATAAGGCGTCTG |
| | | | ACTTCGGATCAGAAGATTGAGGGTTCGAGTC |
| | | | CCTCCGTGGTCG |
| 1207 | Arg | TCT | GGCTCTGTGGCGCAATGGATNAGCGCATTG |
| | | | GACTTCTAATTCAAAGGTTGCGGGTTCGAGT |
| | | | CCCNCCAGAGTCG |
| 1208 | Asn | GTT | GTCTCTGTGGCGCAATCGGTTAGCGCGTTCG |
| | | | GCTGTTAACCGNAAAGGTTGGTGGTTCGAGC |
| | | | CCACCCAGGGACG |
| 1209 | Asp | GTC | TCCTCGTTAGTATAGTGGTGAGTATCCCCGC |
| | | | CTGTCACGCGGGAGACCGGGGTTCGATTCCC |
| | | | CGACGGGGAG |
| 1210 | Cys | GCA | GGGGGTATAGCTCAGNGGGTAGAGCATTTG |
| | | | ACTGCAGATCAAGAGGTCCCCGGTTCAAATC |
| | | | CGGGTGCCCCCT |
| 1211 | Gln | CTG | GGTTCCATGGTGTAATGGTNAGCACTCTGGA |
| | | | CTCTGAATCCAGCGATCCGAGTTCAAGTCTC |
| | | | GGTGGAACCT |
| 1212 | Gln | TTG | GGTCCCATGGTGTAATGGTTAGCACTCTGGA |
| | | | CTTTGAATCCAGCGATCCGAGTTCAAATCTC |
| | | | GGTGGGACCT |
| 1213 | Glu | CTC | TCCCTGGTGGTCTAGTGGTTAGGATTCGGCG |
| | | | CTCTCACCGCCGCGGCCCGGGTTCGATTCCC |
| | | | GGTCAGGGAA |
| 1214 | Glu | TTC | TCCCTGGTGGTCTAGTGGCTAGGATTCGGCG |
| | | | CTTTCACCGCNGCGGCCCGGGTTCGATTCCC |
| | | | GGTCAGGGAA |
| 1215 | Gly | CCC | GCATTGGTGGTTCAGTGGTAGAATTCTCGCC |
| | | | TCCCACGCNGGAGACCCGGGTTCGATTCCCG |
| | | | GCCAATGCA |
| 1216 | Gly | GCC | GCATTGGTGGTTCAGTGGTAGAATTCTCGCC |
| | | | TGCCACGCGGGAGGCCCGGGTTCGATTCCCG |
| | | | GCCAATGCA |
| 1217 | Gly | TCC | GCGTTGGTGGTATAGTGGTGAGCATAGCTGC |
| | | | CTTCCAAGCAGTTGACCCGGGTTCGATTCCC |
| | | | GGCCAACGCA |
| 1218 | Ile | AAT | GGCCGGTTAGCTCAGTTGGTTAGAGCGTGGT |
| | | | GCTAATAACGCCAAGGTCGCGGGTTCGATCC |
| | | | CCGTACGGGCCA |
| 1219 | Ile | TAT | GCTCCAGTGGCGCAATCGGTTAGCGCGCGGT |
| | | | ACTTATAATGCCGAGGTTGTGAGTTCGAGCC |
| | | | TCACCTGGAGCA |
| 1220 | Leu | AAG | GGTAGCGTGGCCGAGCGGTCTAAGGCGCTG |
| | | | GATTAAGGCTCCAGTCTCTTCGGGGGCGTGG |
| | | | GTTCGAATCCCACCGCTGCCA |
| 1221 | Leu | CAA | GTCAGGATGGCCGAGTGGTCNTAAGGCGCC |
| | | | AGACTCAAGTTCTGGTCTCCGNATGGAGGCG |
| | | | TGGGTTCGAATCCCACTTCTGACA |
| 1222 | Leu | CAG | GTCAGGATGGCCGAGCGGTCTAAGGCGCTG |
| | | | CGTTCAGGTCGCAGTCTCCCCTGGAGGCGTG |
| | | | GGTTCGAATCCCACTCCTGACA |
| 1223 | Lcu | TAA | ACCAGGATGGCCGAGTGGTTAAGGCGTTGG |
| | | | ACTTAAGATCCAATGGACAGATGTCCGCGTG |
| | | | GGTTCGAACCCCACTCCTGGTA |
| 1224 | Leu | TAG | GGTAGCGTGGCCGAGCGGTCTAAGGCGCTG |
| | | | GATTTAGGCTCCAGTCTCTTCGGNGGCGTGG |
| | | | GTTCGAATCCCACCGCTGCCA |
| 1225 | Lys | CTT | GCCCGGCTAGCTCAGTCGGTAGAGCATGAG |
| | | | ACTCTTAATCTCAGGGTCGTGGGTTCGAGCC |
| | | | CCACGTTGGGCGNNN |
| 1226 | Lys | TTT | GCCTGGATAGCTCAGTCGGTAGAGCATCAG |
| | | | ACTTTTAATCTGAGGGTCCAGGGTTCAAGTC |
| | | | CCTGTTCAGGCG |
| 1227 | Met | CAT | GCCCTCTTAGCGCAGTNGGCAGCGCGTCAGT |
| | | | CTCATAATCTGAAGGTCCTGAGTTCGAGCCT |
| | | | CAGAGAGGGCA |
| 1228 | Phe | GAA | GCCGAAATAGCTCAGTTGGGAGAGCGTTAG |
| | | | ACTGAAGATCNTAAAGGTCCCTGGTTCAATC |
| | | | CCGGGTTTCGGCA |
| 1229 | Pro | AGG | GGCTCGTTGGTCTAGGGGTATGATTCTCGCT |
| | | | TAGGATGCGAGAGGTCCCGGGTTCAAATCC |
| | | | CGGACGAGCCC |
| 1230 | Pro | CGG | GGCTCGTTGGTCTAGGGGTATGATTCTCGCT |
| | | | TCGGGTGCGAGAGGTCCCGGGTTCAAATCCC |
| | | | GGACGAGCCC |
| 1231 | Pro | TGG | GGCTCGTTGGTCTAGGGGTATGATTCTCGCT |
| | | | TTGGGTGCGAGAGGTCCCGGGTTCAAATCCC |
| | | | GGACGAGCCC |
| 1232 | Ser | AGA | GTAGTCGTGGCCGAGTGGTTAAGGCGATGG |
| | | | ACTAGAAATCCATTGGGGTTTCCCCGCGCAG |
| | | | GTTCGAATCCTGCCGACTACG |
| 1233 | Ser | CGA | GCTGTGATGGCCGAGTGGTTAAGGCGTTGG |
| | | | ACTCGAAATCCAATGGGGTCTCCCCGCGCAG |
| | | | GTTCGAATCCTGCTCACAGCG |
| 1234 | Ser | GCT | GACGAGGNNTGGCCGAGTGGTTAAGGCGAT |
| | | | GGACTGCTAATCCATTGTGCTCTGCACGCGT |
| | | | GGGTTCGAATCCCATCCTCGTCG |
| 1235 | Ser | TGA | GTAGTCGTGGCCGAGTGGTTAAGGCGATGG |
| | | | ACTTGAAATCCATTGGGGTCTCCCCGCGCAG |
| | | | GTTCGAATCCTGCCGGCTACG |
| 1236 | Thr | AGT | GGCTCCGTGGCTTAGCTGGTTAAAGCGCCTG |
| | | | TCTAGTAAACAGGAGATCCTGGGTTCGAATC |
| | | | CCAGCGGGGCCT |
| 1237 | Thr | CGT | GGCNCTGTGGCTNAGTNGGNTAAAGCGCCG |
| | | | GTCTCGTAAACCNGGAGATCNTGGGTTCGA |
| | | | ATCCCANCNGGGCCT |
| 1238 | Thr | TGT | GGCTCCATAGCTCAGNGGGTTAGAGCACTG |
| | | | GTCTTGTAAACCAGGGGTCGCGAGTTCAAAT |
| | | | CTCGCTGGGGCCT |
| 1239 | Trp | CCA | GACCTCGTGGCGCAACGGTAGCGCGTCTGA |
| | | | CTCCAGATCAGAAGGTTGCGTGTTCAAATCA |
| | | | CGTCGGGGTCA |
| 1240 | Tyr | GTA | CCTTCGATAGCTCAGCTGGTAGAGCGGAGG |
| | | | ACTGTAGATCCTTAGGTCGCTGGTTCGATTC |
| | | | CGGCTCGAAGGA |
| 1241 | Val | AAC | GTTTCCGTAGTGTAGTGGTTATCACGTTCGC |
| | | | CTAACACGCGAAAGGTCCCCGGTTCGAAAC |
| | | | CGGGCGGAAACA |
| 1242 | Val | CAC | GTTTCCGTAGTGTAGTGGTTATCACGTTCGC |
| | | | CTCACACGCGAAAGGTCCCCGGTTCGAAAC |
| | | | CGGGCGGAAACA |
| 1243 | Val | TAC | GGTTCCATAGTGTAGTGGTTATCACGTCTGC |
| | | | TTTACACGCAGAAGGTCCTGGGTTCGAGCCC |
| | | | CAGTGGAACCA |
| 1244 | iMet | CAT | AGCAGAGTGGCGCAGCGGAAGCGTGCTGGG |
| | | | CCCATAACCCAGAGGTCGATGGATCGAAAC |
| | | | CATCCTCTGCTA |

TABLE 10B
Consensus sequence computationally generated
for each isodecoder by aligning
members of the isodecoder family

| SEQ | Amino | Anti- | |
|---|---|---|---|
| ID NO | Acid | codon | Consensus sequence |
| 1245 | Ala | AGC | GGGGAATTAGCTCAAGTGGTAGAGCGCTTGC |
| | | | TTAGCATGCAAGAGGTAGTGGGATCGATGCC |
| | | | CACATTCTCCANNN |
| 1246 | Ala | CGC | GGGGATGTAGCTCAGTGGTAGAGCGCATGCT |
| | | | TCGCATGTATGAGGTCCCGGGTTCGATCCCC |
| | | | GGCATCTCCANNN |
| 1247 | Ala | TGC | GGGGGTGTAGCTCAGTGGTAGAGCGCATGCT |
| | | | TTGCATGTATGAGGCCCCGGGTTCGATCCCC |
| | | | GGCACCTCCANNN |
| 1248 | Arg | ACG | GGGCCAGTGGCGCAATGGATAACGCGTCTGA |
| | | | CTACGGATCAGAAGATTCCAGGTTCGACTCC |
| | | | TGGCTGGCTCGNNN |
| 1249 | Arg | CCG | GGCCGCGTGGCCTAATGGATAAGGCGTCTGA |
| | | | TTCCGGATCAGAAGATTGAGGGTTCGAGTCC |
| | | | CTTCGTGGTCGNNN |
| 1250 | Arg | CCT | GCCCCAGTGGCCTAATGGATAAGGCACTGGC |
| | | | CTCCTAAGCCAGGGATTGTGGGTTCGAGTCC |
| | | | CACCTGGGGTANNN |
| 1251 | Arg | TCG | GACCGCGTGGCCTAATGGATAAGGCGTCTGA |
| | | | CTTCGGATCAGAAGATTGAGGGTTCGAGTCC |
| | | | CTCCGTGGTCGNNN |
| 1252 | Arg | TCT | GGCTCTGTGGCGCAATGGATNAGCGCATTGG |
| | | | ACTTCTAATTCAAAGGTTGCGGGTTCGAGTC |
| | | | CCNCCAGAGTCGNNN |
| 1253 | Asn | GTT | GTCTCTGTGGCGCAATCGGTTAGCGCGTTCG |
| | | | GCTGTTAACCGNAAAGGTTGGTGGTTCGAGC |
| | | | CCACCCAGGGACGNNN |
| 1254 | Asp | GTC | TCCTCGTTAGTATAGTGGTGAGTATCCCCGC |
| | | | CTGTCACGCGGGAGACCGGGGTTCGATTCCC |
| | | | CGACGGGGAGNNN |
| 1255 | Cys | GCA | GGGGGTATAGCTCAGNGGGTAGAGCATTTGA |
| | | | CTGCAGATCAAGAGGTCCCCGGTTCAAATCC |
| | | | GGGTGCCCCCTNNN |
| 1256 | Gln | CTG | GGTTCCATGGTGTAATGGTNAGCACTCTGGA |
| | | | CTCTGAATCCAGCGATCCGAGTTCAAGTCTC |
| | | | GGTGGAACCTNNN |
| 1257 | Gln | TTG | GGTCCCATGGTGTAATGGTTAGCACTCTGGA |
| | | | CTTTGAATCCAGCGATCCGAGTTCAAATCTC |
| | | | GGTGGGACCTNNN |
| 1258 | Glu | CTC | TCCCTGGTGGTCTAGTGGTTAGGATTCGGCG |
| | | | CTCTCACCGCCGCGGCCCGGGTTCGATTCCC |
| | | | GGTCAGGGAANNN |
| 1259 | Glu | TTC | TCCCTGGTGGTCTAGTGGCTAGGATTCGGCG |
| | | | CTTTCACCGCNGCGGCCCGGGTTCGATTCCC |
| | | | GGTCAGGGAANNN |
| 1260 | Gly | CCC | GCATTGGTGGTTCAGTGGTAGAATTCTCGCC |
| | | | TCCCACGCNGGAGACCCGGGTTCGATTCCCG |
| | | | GCCAATGCANNN |
| 1261 | Gly | GCC | GCATTGGTGGTTCAGTGGTAGAATTCTCGCC |
| | | | TGCCACGCGGGAGGCCCGGGTTCGATTCCCG |
| | | | GCCAATGCANNN |
| 1262 | Gly | TCC | GCGTTGGTGGTATAGTGGTGAGCATAGCTGC |
| | | | CTTCCAAGCAGTTGACCCGGGTTCGATTCCC |
| | | | GGCCAACGCANNN |
| 1263 | Ile | AAT | GGCCGGTTAGCTCAGTTGGTTAGAGCGTGGT |
| | | | GCTAATAACGCCAAGGTCGCGGGTTCGATCC |
| | | | CCGTACGGGCCANNN |
| 1264 | Ile | TAT | GCTCCAGTGGCGCAATCGGTTAGCGCGCGGT |
| | | | ACTTATAATGCCGAGGTTGTGAGTTCGAGCC |
| | | | TCACCTGGAGCANNN |
| 1265 | Leu | AAG | GGTAGCGTGGCCGAGCGGTCTAAGGCGCTGG |
| | | | ATTAAGGCTCCAGTCTCTTCGGGGGCGTGGG |
| | | | TTCGAATCCCACCGCTGCCANNN |
| 1266 | Leu | CAA | GTCAGGATGGCCGAGTGGTCNTAAGGCGCCA |
| | | | GACTCAAGTTCTGGTCTCCGNATGGAGGCGT |
| | | | GGGTTCGAATCCCACTTCTGACANNN |
| 1267 | Leu | CAG | GTCAGGATGGCCGAGCGGTCTAAGGCGCTGC |
| | | | GTTCAGGTCGCAGTCTCCCCTGGAGGCGTGG |
| | | | GTTCGAATCCCACTCCTGACANNN |
| 1268 | Leu | TAA | ACCAGGATGGCCGAGTGGTTAAGGCGTTGGA |
| | | | CTTAAGATCCAATGGACAGATGTCCGCGTGG |
| | | | GTTCGAACCCCACTCCTGGTANNN |
| 1269 | Leu | TAG | GGTAGCGTGGCCGAGCGGTCTAAGGCGCTGG |
| | | | ATTTAGGCTCCAGTCTCTTCGGNGGCGTGGG |
| | | | TTCGAATCCCACCGCTGCCANNN |
| 1270 | Lys | CTT | GCCCGGCTAGCTCAGTCGGTAGAGCATGAGA |
| | | | CTCTTAATCTCAGGGTCGTGGGTTCGAGCCC |
| | | | CACGTTGGGCGNNNNNN |
| 1271 | Lys | TTT | GCCTGGATAGCTCAGTCGGTAGAGCATCAGA |
| | | | CTTTTAATCTGAGGGTCCAGGGTTCAAGTCC |
| | | | CTGTTCAGGCGNNN |
| 1272 | Met | CAT | GCCCTCTTAGCGCAGTNGGCAGCGCGTCAGT |
| | | | CTCATAATCTGAAGGTCCTGAGTTCGAGCCT |
| | | | CAGAGAGGGCANNN |
| 1273 | Phe | GAA | GCCGAAATAGCTCAGTTGGGAGAGCGTTAGA |
| | | | CTGAAGATCNTAAAGGTCCCTGGTTCAATCC |
| | | | CGGGTTTCGGCANNN |
| 1274 | Pro | AGG | GGCTCGTTGGTCTAGGGGTATGATTCTCGCT |
| | | | TAGGATGCGAGAGGTCCCGGGTTCAAATCCC |
| | | | GGACGAGCCCNNN |
| 1275 | Pro | CGG | GGCTCGTTGGTCTAGGGGTATGATTCTCGCT |
| | | | TCGGGTGCGAGAGGTCCCGGGTTCAAATCCC |
| | | | GGACGAGCCCNNN |
| 1276 | Pro | TGG | GGCTCGTTGGTCTAGGGGTATGATTCTCGCT |
| | | | TTGGGTGCGAGAGGTCCCGGGTTCAAATCCC |
| | | | GGACGAGCCCNNN |
| 1277 | Ser | AGA | GTAGTCGTGGCCGAGTGGTTAAGGCGATGGA |
| | | | CTAGAAATCCATTGGGGTTTCCCCGCGCAGG |
| | | | TTCGAATCCTGCCGACTACGNNN |
| 1278 | Ser | CGA | GCTGTGATGGCCGAGTGGTTAAGGCGTTGGA |
| | | | CTCGAAATCCAATGGGGTCTCCCCGCGCAGG |
| | | | TTCGAATCCTGCTCACAGCGNNN |
| 1279 | Ser | GCT | GACGAGGNNTGGCCGAGTGGTTAAGGCGAT |
| | | | GGACTGCTAATCCATTGTGCTCTGCACGCGT |
| | | | GGGTTCGAATCCCATCCTCGTCGNNN |
| 1280 | Ser | TGA | GTAGTCGTGGCCGAGTGGTTAAGGCGATGGA |
| | | | CTTGAAATCCATTGGGGTCTCCCCGCGCAGG |
| | | | TTCGAATCCTGCCGGCTACGNNN |
| 1281 | Thr | AGT | GGCTCCGTGGCTTAGCTGGTTAAAGCGCCTG |
| | | | TCTAGTAAACAGGAGATCCTGGGTTCGAATC |
| | | | CCAGCGGGGCCTNNN |
| 1282 | Thr | CGT | GGCNCTGTGGCTNAGTNGGNTAAAGCGCCGG |
| | | | TCTCGTAAACCNGGAGATCNTGGGTTCGAAT |
| | | | CCCANCNGGGCCTNNN |
| 1283 | Thr | TGT | GGCTCCATAGCTCAGNGGGTTAGAGCACTGG |
| | | | TCTTGTAAACCAGGGGTCGCGAGTTCAAATC |
| | | | TCGCTGGGGCCTNNN |
| 1284 | Trp | CCA | GACCTCGTGGCGCAACGGTAGCGCGTCTGAC |
| | | | TCCAGATCAGAAGGTTGCGTGTTCAAATCAC |
| | | | GTCGGGGTCANNN |
| 1285 | Tyr | GTA | CCTTCGATAGCTCAGCTGGTAGAGCGGAGGA |
| | | | CTGTAGATCCTTAGGTCGCTGGTTCGATTCC |
| | | | GGCTCGAAGGANNN |
| 1286 | Val | AAC | GTTTCCGTAGTGTAGTGGTTATCACGTTCGC |
| | | | CTAACACGCGAAAGGTCCCCGGTTCGAAACC |
| | | | GGGCGGAAACANNN |
| 1287 | Val | CAC | GTTTCCGTAGTGTAGTGGTTATCACGTTCGC |
| | | | CTCACACGCGAAAGGTCCCCGGTTCGAAACC |
| | | | GGGCGGAAACANNN |
| 1288 | Val | TAC | GGTTCCATAGTGTAGTGGTTATCACGTCTGC |
| | | | TTTACACGCAGAAGGTCCTGGGTTCGAGCCC |
| | | | CAGTGGAACCANNN |
| 1289 | iMet | CAT | AGCAGAGTGGCGCAGCGGAAGCGTGCTGGG |
| | | | CCCATAACCCAGAGGTCGATGGATCGAAACC |
| | | | ATCCTCTGCTANNN |

TABLE 11
Score values alignment

| | Candidate | Reference | Match |
|---|---|---|---|
| Row | nucleotide | nucleotide | score |
| 1 | A | A | 1 |
| 2 | T | T | 1 |
| 3 | U | T | 1 |
| 4 | C | C | 1 |
| 5 | G | G | 1 |
| 6 | A | N | 0 |
| 7 | T | N | 0 |
| 8 | C | N | 0 |
| 9 | G | N | 0 |
| 10 | N | A | 0 |
| 11 | N | T | 0 |
| 12 | N | C | 0 |
| 13 | N | G | 0 |
| 14 | N | N | 0 |

### Method of Making TREMs, TREM Core Fragments, and TREM Fragments

[1443] Methods for synthesizing oligonucleotides are known in the art and can be used to make a TREM, a TREM core fragment or a TREM fragment disclosed herein. For example, a TREM, TREM core fragment or TREM fragment can be synthesized using solid phase synthesis or liquid phase synthesis.

[1444] In an embodiment, a TREM, a TREM core fragment or a TREM fragment made according to a synthetic method disclosed herein has a different modification profile compared to a TREM expressed and isolated from a cell, or compared to a naturally occurring tRNA.

[1445] An exemplary method for making a synthetic TREM via 5′-Silyl-2′-Orthoester (2′-ACE) chemistry is provided in Example 3. The method provided in Example 3 can also be used to make a synthetic TREM core fragment or synthetic TREM fragment. Additional synthetic methods are disclosed in Hartsel S A et al., (2005) Oligonucleotide Synthesis, 033-050, the entire contents of which are hereby incorporated by reference.

### TREM Composition

[1446] In an embodiment, a TREM composition, e.g., a TREM pharmaceutical composition, comprises a pharmaceutically acceptable excipient. Exemplary excipients include those provided in the FDA Inactive Ingredient Database (https://www.accessdata.fda.gov/scripts/cder/iig/index.Cfm).

[1447] In an embodiment, a TREM composition, e.g., a TREM pharmaceutical composition, comprises at least 1, 2, 3, 4, 5, 6, 7, 8, 9, 10, 15, 20, 30, 40, 50, 60, 70, 80, 90, 100 or 150 grams of TREM, TREM core fragment or TREM fragment. In an embodiment, a TREM composition, e.g., a TREM pharmaceutical composition, comprises at least 1, 2, 3, 4, 5, 6, 7, 8, 9, 10, 15, 20, 30, 40, 50 or 100 milligrams of TREM, TREM core fragment or TREM fragment.

[1448] In an embodiment, a TREM composition, e.g., a TREM pharmaceutical composition, is at least 10, 20, 30, 40, 50, 60, 70, 80, 90, 95 or 99% dry weight TREMs, TREM core fragments or TREM fragments.

[1449] In an embodiment, a TREM composition comprises at least 1×10⁶ TREM molecules, at least 1×10⁷ TREM molecules, at least 1×10⁸ TREM molecules or at least 1×10⁹ TREM molecules.

[1450] In an embodiment, a TREM composition comprises at least 1×10⁶ TREM core fragment molecules, at least 1×10⁷ TREM core fragment molecules, at least 1×10⁸ TREM core fragment molecules or at least 1×10⁹ TREM core fragment molecules.

[1451] In an embodiment, a TREM composition comprises at least 1×10⁶ TREM fragment molecules, at least 1×10⁷ TREM fragment molecules, at least 1×10⁸ TREM fragment molecules or at least 1×10⁹ TREM fragment molecules.

[1452] In an embodiment, a TREM composition produced by any of the methods of making disclosed herein can be charged with an amino acid using an in vitro charging reaction as known in the art.

[1453] In an embodiment, a TREM composition comprise one or more species of TREMs, TREM core fragments, or TREM fragments. In an embodiment, a TREM composition comprises a single species of TREM, TREM core fragment, or TREM fragment. In an embodiment, a TREM composition comprises a first TREM, TREM core fragment, or TREM fragment species and a second TREM, TREM core fragment, or TREM fragment species. In an embodiment, the TREM composition comprises X TREM, TREM core fragment, or TREM fragment species, wherein X=2, 3, 4, 5, 6, 7, 8, 9, or 10.

[1454] In an embodiment, the TREM, TREM core fragment, or TREM fragment has at least 70, 75, 80, 85, 90, or 95, or has 100%, identity with a sequence encoded by a nucleic acid in Table 1.

[1455] In an embodiment, the TREM comprises a consensus sequence provided herein.

[1456] A TREM composition can be formulated as a liquid composition, as a lyophilized composition or as a frozen composition.

[1457] In some embodiments, a TREM composition can be formulated to be suitable for pharmaceutical use, e.g., a pharmaceutical TREM composition. In an embodiment, a pharmaceutical TREM composition is substantially free of materials and/or reagents used to separate and/or purify a TREM, TREM core fragment, or TREM fragment.

[1458] In some embodiments, a TREM composition can be formulated with water for injection. In some embodiments, a TREM composition formulated with water for injection is suitable for pharmaceutical use, e.g., comprises a pharmaceutical TREM composition.

### TREM Characterization

[1459] A TREM, TREM core fragment, or TREM fragment, or a TREM composition, e.g., a pharmaceutical TREM composition, produced by any of the methods disclosed herein can be assessed for a characteristic associated with the TREM, TREM core fragment, or TREM fragment or the TREM composition, such as purity, sterility, concentration, structure, or functional activity of the TREM, TREM core fragment, or TREM fragment. Any of the above-mentioned characteristics can be evaluated by providing a value for the characteristic, e.g., by evaluating or testing the TREM, TREM core fragment, or TREM fragment, or the TREM composition, or an intermediate in the production of the TREM composition. The value can also be compared with a standard or a reference value. Responsive to the evaluation, the TREM composition can be classified, e.g., as ready for release, meets production standard for human trials, complies with ISO standards, complies with cGMP standards, or complies with other pharmaceutical standards. Responsive to the evaluation, the TREM composition can be subjected to further processing, e.g., it can be divided into aliquots, e.g., into single or multi-dosage amounts, disposed in a container, e.g., an end-use vial, packaged, shipped, or put into commerce. In embodiments, in response to the evaluation, one or more of the characteristics can be modulated, processed or re-processed to optimize the TREM composition. For example, the TREM composition can be modulated, processed or re-processed to (i) increase the purity of the TREM composition; (ii) decrease the amount of fragments in the composition; (iii) decrease the amount of endotoxins in the composition; (iv) increase the in vitro translation activity of the composition; (v) increase the TREM concentration of the composition; or (vi) inactivate or remove any viral contaminants present in the composition, e.g., by reducing the pH of the composition or by filtration.

[1460] In an embodiment, the TREM, TREM core fragment, or TREM fragment (e.g., TREM composition or an intermediate in the production of the TREM composition) has a purity of at least 30%, 40%, 50%, 60%, 70%, 80%, 85%, 90%, 91%, 92%, 93%, 94%, 95%, 96%, 97%, 98%, or 99%, i.e., by mass.

[1461] In an embodiment, the TREM (e.g., TREM composition or an intermediate in the production of the TREM composition) has less than 0.1%, 0.5%, 1%, 2%, 3%, 4%, 5%, 6%, 7%, 8%, 9%, 10%, 15%, 20%, 25% TREM fragments relative to full length TREMs.

[1462] In an embodiment, the TREM, TREM core fragment, or TREM fragment (e.g., TREM composition or an intermediate in the production of the TREM composition) has low levels or absence of endotoxins, e.g., a negative result as measured by the Limulus amebocyte lysate (LAL) test.

[1463] In an embodiment, the TREM, TREM core fragment, or TREM fragment (e.g., TREM composition or an intermediate in the production of the TREM composition) has in-vitro translation activity, e.g., as measured by an assay described in Examples 12-13.

[1464] In an embodiment, the TREM, TREM core fragment, or TREM fragment (e.g., TREM composition or an intermediate in the production of the TREM composition) has a TREM concentration of at least 0.1 ng/mL, 0.5 ng/ml, 1 ng/mL, 5 ng/mL, 10 ng/ml, 50 ng/mL, 0.1 ug/mL, 0.5 ug/mL, 1 ug/mL, 2 ug/mL, 5 ug/mL, 10 ug/mL, 20 ug/mL, 30 ug/mL, 40 ug/mL, 50 ug/mL, 60 ug/mL, 70 ug/mL, 80 ug/mL, 100 ug/mL, 200 ug/mL, 300 ug/mL, 500 ug/mL, 1000 ug/mL, 5000 ug/mL, 10,000 ug/mL, or 100,000 ug/mL.

[1465] In an embodiment, the TREM, TREM core fragment, or TREM fragment (e.g., TREM composition or an intermediate in the production of the TREM composition) is sterile, e.g., the composition or preparation supports the growth of fewer than 100 viable microorganisms as tested under aseptic conditions, the composition or preparation meets the standard of USP <71>, and/or the composition or preparation meets the standard of USP <85>.

[1466] In an embodiment, the TREM, TREM core fragment, or TREM fragment (e.g., TREM composition or an intermediate in the production of the TREM composition) has an undetectable level of viral contaminants, e.g., no viral contaminants. In an embodiment, any viral contaminant, e.g., residual virus, present in the composition is inactivated or removed. In an embodiment, any viral contaminant, e.g., residual virus, is inactivated, e.g., by reducing the pH of the composition. In an embodiment, any viral contaminant, e.g., residual virus, is removed, e.g., by filtration or other methods known in the field.

### TREM Administration

[1467] Any TREM composition or pharmaceutical composition described herein can be administered to a cell, tissue or subject, e.g., by direct administration to a cell, tissue and/or an organ in vitro, ex-vivo or in vivo. In-vivo administration may be via, e.g., by local, systemic and/or parenteral routes, for example intravenous, subcutaneous, intraperitoneal, intrathecal, intramuscular, ocular, nasal, urogenital, intradermal, dermal, enteral, intravitreal, intracerebral, intrathecal, or epidural.

### Vectors and Carriers

[1468] In some embodiments the TREM, TREM core fragment, or TREM fragment or TREM composition described herein, is delivered to cells, e.g. mammalian cells or human cells, using a vector. The vector may be, e.g., a plasmid or a virus. In some embodiments, delivery is in vivo, in vitro, ex vivo, or in situ. In some embodiments, the virus is an adeno associated virus (AAV), a lentivirus, an adenovirus. In some embodiments, the system or components of the system are delivered to cells with a viral-like particle or a virosome. In some embodiments, the delivery uses more than one virus, viral-like particle or virosome.

### Carriers

[1469] A TREM, a TREM composition or a pharmaceutical TREM composition described herein may comprise, may be formulated with, or may be delivered in, a carrier.

### Viral Vectors

[1470] The carrier may be a viral vector (e.g., a viral vector comprising a sequence encoding a TREM, a TREM core fragment or a TREM fragment). The viral vector may be administered to a cell or to a subject (e.g., a human subject or animal model) to deliver a TREM, a TREM core fragment or a TREM fragment, a TREM composition or a pharmaceutical TREM composition.

[1471] A viral vector may be systemically or locally administered (e.g., injected). Viral genomes provide a rich source of vectors that can be used for the efficient delivery of exogenous genes into a mammalian cell. Viral genomes are known in the art as useful vectors for delivery because the polynucleotides contained within such genomes are typically incorporated into the nuclear genome of a mammalian cell by generalized or specialized transduction. These processes occur as part of the natural viral replication cycle, and do not require added proteins or reagents in order to induce gene integration. Examples of viral vectors include a retrovirus (e.g., Retroviridae family viral vector), adenovirus (e.g., Ad5, Ad26, Ad34, Ad35, and Ad48), parvovirus (e.g., adeno-associated viruses), coronavirus, negative strand RNA viruses such as orthomyxovirus (e.g., influenza virus), rhabdovirus (e.g., rabies and vesicular stomatitis virus), paramyxovirus (e.g., measles and Sendai), positive strand RNA viruses, such as picornavirus and alphavirus, and double stranded DNA viruses including adenovirus, herpesvirus (e.g., Herpes Simplex virus types 1 and 2, Epstein-Barr virus, cytomegalovirus, replication deficient herpes virus), and poxvirus (e.g., vaccinia, modified vaccinia Ankara (MVA), fowlpox and canarypox). Other viruses include Norwalk virus, togavirus, flavivirus, reoviruses, papovavirus, hepadnavirus, human papilloma virus, human foamy virus, and hepatitis virus, for example. Examples of retroviruses include: avian leukosis-sarcoma, avian C-type viruses, mammalian C-type, B-type viruses, D-type viruses, oncoretroviruses, HTLV-BLV group, lentivirus, alpharetrovirus, gammaretrovirus, spumavirus (Coffin, J. M., Retroviridae: The viruses and their replication, Virology (Third Edition) Lippincott-Raven, Philadelphia, 1996). Other examples include murine leukemia viruses, murine sarcoma viruses, mouse mammary tumor virus, bovine leukemia virus, feline leukemia virus, feline sarcoma virus, avian leukemia virus, human T-cell leukemia virus, baboon endogenous virus, Gibbon ape leukemia virus, Mason Pfizer monkey virus, simian immunodeficiency virus, simian sarcoma virus, Rous sarcoma virus and lentiviruses. Other examples of vectors are described, for example, in U.S. Pat. No. 5,801,030, the teachings of which are incorporated herein by reference. In some embodiments the system or components of the system are delivered to cells with a viral-like particle or a virosome.

### Cell and Vesicle-Based Carriers

[1472] A TREM, a TREM core fragment or a TREM fragment, a TREM composition or a pharmaceutical TREM composition described herein can be administered to a cell in a vesicle or other membrane-based carrier.

[1473] In embodiments, a TREM, a TREM core fragment or a TREM fragment, or TREM composition, or pharmaceutical TREM composition described herein is administered in or via a cell, vesicle or other membrane-based carrier. In one embodiment, the TREM, TREM core fragment, TREM fragment, or TREM composition or pharmaceutical TREM composition can be formulated in liposomes or other similar vesicles. Liposomes are spherical vesicle structures composed of a uni- or multilamellar lipid bilayer surrounding internal aqueous compartments and a relatively impermeable outer lipophilic phospholipid bilayer. Liposomes may be anionic, neutral or cationic. Liposomes are biocompatible, nontoxic, can deliver both hydrophilic and lipophilic drug molecules, protect their cargo from degradation by plasma enzymes, and transport their load across biological membranes and the blood brain barrier (BBB) (see, e.g., Spuch and Navarro, Journal of Drug Delivery, vol. 2011, Article ID 469679, 12 pages, 2011. doi: 10.1155/2011/469679 for review).

[1474] Vesicles can be made from several different types of lipids; however, phospholipids are most commonly used to generate liposomes as drug carriers. Methods for preparation of multilamellar vesicle lipids are known in the art (see for example U.S. Pat. No. 6,693,086, the teachings of which relating to multilamellar vesicle lipid preparation are incorporated herein by reference). Although vesicle formation can be spontaneous when a lipid film is mixed with an aqueous solution, it can also be expedited by applying force in the form of shaking by using a homogenizer, sonicator, or an extrusion apparatus (see, e.g., Spuch and Navarro, Journal of Drug Delivery, vol. 2011, Article ID 469679, 12 pages, 2011. doi: 10.1155/2011/469679 for review). Extruded lipids can be prepared by extruding through filters of decreasing size, as described in Templeton et al., Nature Biotech, 15:647-652, 1997, the teachings of which relating to extruded lipid preparation are incorporated herein by reference.

[1475] Lipid nanoparticles are another example of a carrier that provides a biocompatible and biodegradable delivery system for the TREM, TREM core fragment, TREM fragment, or TREM composition or pharmaceutical TREM composition described herein. Nanostructured lipid carriers (NLCs) are modified solid lipid nanoparticles (SLNs) that retain the characteristics of the SLN, improve drug stability and loading capacity, and prevent drug leakage. Polymer nanoparticles (PNPs) are an important component of drug delivery. These nanoparticles can effectively direct drug delivery to specific targets and improve drug stability and controlled drug release. Lipid-polymer nanoparticles (PLNs), a new type of carrier that combines liposomes and polymers, may also be employed. These nanoparticles possess the complementary advantages of PNPs and liposomes. A PLN is composed of a core-shell structure; the polymer core provides a stable structure, and the phospholipid shell offers good biocompatibility. As such, the two components increase the drug encapsulation efficiency rate, facilitate surface modification, and prevent leakage of water-soluble drugs. For a review, see, e.g., Li et al. 2017, Nanomaterials 7, 122; doi: 10.3390/nano7060122.

[1476] Exemplary lipid nanoparticles are disclosed in International Application PCT/US2014/053907, the entire contents of which are hereby incorporated by reference. For example, an LNP described in paragraphs [403-406] or [410-413] of PCT/US2014/053907 can be used as a carrier for the TREM, TREM core fragment, TREM fragment, or TREM composition or pharmaceutical TREM composition described herein.

[1477] Additional exemplary lipid nanoparticles are disclosed in U.S. Pat. No. 10,562,849 the entire contents of which are hereby incorporated by reference. For example, an LNP of formula (I) as described in columns 1-3 of U.S. Pat. No. 10,562,849 can be used as a carrier for the TREM, TREM core fragment, TREM fragment, or TREM composition or pharmaceutical TREM composition described herein.

[1478] Lipids that can be used in nanoparticle formations (e.g., lipid nanoparticles) include, for example those described in Table 4 of WO2019217941, which is incorporated by reference, e.g., a lipid-containing nanoparticle can comprise one or more of the lipids in Table 4 of WO2019217941. Lipid nanoparticles can include additional elements, such as polymers, such as the polymers described in Table 5 of WO2019217941, incorporated by reference.

[1479] In some embodiments, conjugated lipids, when present, can include one or more of PEG-diacylglycerol (DAG) (such as 1-(monomethoxy-polyethyleneglycol)-2,3-dimyristoylglycerol (PEG-DMG)), PEG-dialkyloxypropyl (DAA), PEG-phospholipid, PEG-ceramide (Cer), a pegylated phosphatidylethanoloamine (PEG-PE), PEG succinate diacylglycerol (PEGS-DAG) (such as 4-0-(2′,3′-di (tetradecanoyloxy) propyl-1-0-(w-methoxy(polyethoxy)ethyl) butanedioate (PEG-S-DMG)), PEG dialkoxypropylcarbam, N-(carbonyl-methoxypoly ethylene glycol 2000)-1,2-distearoyl-sn-glycero-3-phosphoethanolamine sodium salt, and those described in Table 2 of WO2019051289 (incorporated by reference), and combinations of the foregoing.

[1480] In some embodiments, sterols that can be incorporated into lipid nanoparticles include one or more of cholesterol or cholesterol derivatives, such as those in WO2009/127060 or US2010/0130588, which are incorporated by reference. Additional exemplary sterols include phytosterols, including those described in Eygcris ct al (2020), incorporated herein by reference.

[1481] In some embodiments, the lipid particle comprises an ionizable lipid, a non-cationic lipid, a conjugated lipid that inhibits aggregation of particles, and a sterol. The amounts of these components can be varied independently and to achieve desired properties. For example, in some embodiments, the lipid nanoparticle comprises an ionizable lipid is in an amount from about 20 mol % to about 90 mol % of the total lipids (in other embodiments it may be 20-70% (mol), 30-60% (mol) or 40-50% (mol); about 50 mol % to about 90 mol % of the total lipid present in the lipid nanoparticle), a non-cationic lipid in an amount from about 5 mol % to about 30 mol % of the total lipids, a conjugated lipid in an amount from about 0.5 mol % to about 20 mol % of the total lipids, and a sterol in an amount from about 20 mol % to about 50 mol % of the total lipids. The ratio of total lipid to nucleic acid can be varied as desired. For example, the total lipid to nucleic acid (mass or weight) ratio can be from about 10:1 to about 30:1.

[1482] In some embodiments, the lipid to nucleic acid ratio (mass/mass ratio; w/w ratio) can be in the range of from about 1:1 to about 25:1, from about 10:1 to about 14:1, from about 3:1 to about 15:1, from about 4:1 to about 10:1, from about 5:1 to about 9:1, or about 6:1 to about 9:1. The amounts of lipids and nucleic acid can be adjusted to provide a desired N/P ratio, for example, N/P ratio of 3, 4, 5, 6, 7, 8, 9, 10 or higher. Generally, the lipid nanoparticle formulation's overall lipid content can range from about 5 mg/ml to about 30 mg/mL.

[1483] Some non-limiting example of lipid compounds that may be used (e.g., in combination with other lipid components) to form lipid nanoparticles for the delivery of compositions described herein, e.g., nucleic acid (e.g., RNA) described herein includes,

[chemical structure]

[1484] In some embodiments an LNP comprising Formula (i) is used to deliver a TREM composition described herein to the liver and/or hepatocyte cells.

[chemical structure]

[1485] In some embodiments an LNP comprising Formula (ii) is used to deliver a TREM composition described herein to the liver and/or hepatocyte cells.

[chemical structure]

[1486] In some embodiments an LNP comprising Formula (iii) is used to deliver a TREM composition described herein to the liver and/or hepatocyte cells.

[chemical structure]

[1487] In some embodiments an LNP comprising Formula (v) is used to deliver a TREM composition described herein to the liver and/or hepatocyte cells.

[chemical structure]

[1488] In some embodiments an LNP comprising Formula (vi) is used to deliver a TREM composition described herein to the liver and/or hepatocyte cells.

[chemical structure]

[1489] In some embodiments an LNP comprising Formula (viii) is used to deliver a TREM composition described herein to the liver and/or hepatocyte cells.

[chemical structure]

[1490] In some embodiments an LNP comprising Formula (ix) is used to deliver a TREM composition described herein to the liver and/or hepatocyte cells.

[chemical structure]

wherein X¹ is O, NR¹, or a direct bond, X² is C2-5 alkylene, X³ is C(═O) or a direct bond, R¹ is H or Me, R³ is Ci-3 alkyl, R² is Ci-3 alkyl, or R² taken together with the nitrogen atom to which it is attached and 1-3 carbon atoms of X² form a 4-, 5-, or 6-membered ring, or X¹ is NR¹, R¹ and R² taken together with the nitrogen atoms to which they are attached form a 5- or 6-membered ring, or R² taken together with R³ and the nitrogen atom to which they are attached form a 5-, 6-, or 7-membered ring, Y¹ is C2-12 alkylene, Y² is selected from

[chemical structure]

n is 0 to 3, R⁴ is Ci-15 alkyl, Z¹ is Ci-6 alkylene or a direct bond, Z² is

[chemical structure]

(in either orientation) or absent, provided that if Z¹ is a direct bond, Z² is absent; R⁵ is C5-9 alkyl or C6-10 alkoxy, R⁶ is C5-9 alkyl or C6-10 alkoxy, W is methylene or a direct bond, and R⁷ is H or Me, or a salt thereof, provided that if R³ and R² are C2 alkyls, X¹ is O, X² is linear C3 alkylene, X³ is C(=0), Y¹ is linear Ce alkylene, (Y²)n-R⁴ is:

[chemical structure]

R⁴ is linear C5 alkyl, Z¹ is C2 alkylene, Z² is absent, W is methylene, and R⁷ is H, then R⁵ and R⁶ are not Cx alkoxy.

[1491] In some embodiments an LNP comprising Formula (xii) is used to deliver a TREM composition described herein to the liver and/or hepatocyte cells.

[chemical structure]

[1492] In some embodiments an LNP comprising Formula (xi) is used to deliver a TREM composition described herein to the liver and/or hepatocyte cells.

[chemical structure]

[1493] In some embodiments an LNP comprises a compound of Formula (xiii) and a compound of Formula (xiv).

[chemical structure]

[1494] In some embodiments, an LNP comprising Formula (xv) is used to deliver a TREM composition described herein to the liver and/or hepatocyte cells.

[chemical structure]

[1495] In some embodiments an LNP comprising a formulation of Formula (xvi) is used to deliver a TREM composition described herein to the lung endothelial cells.

[chemical structure]

[1496] In some embodiments, a lipid compound used to form lipid nanoparticles for the delivery of compositions described herein, e.g., a TREM described herein is made by one of the following reactions:

[chemical structure]

[1497] In some embodiments, a composition described herein (e.g., TREM composition) is provided in an LNP that comprises an ionizable lipid. In some embodiments, the ionizable lipid is heptadecan-9-yl 8-((2-hydroxyethyl) (6-oxo-6-(undecyloxy) hexyl) amino) octanoate (SM-102); e.g., as described in Example 1 of U.S. Pat. No. 9,867,888 (incorporated by reference herein in its entirety). In some embodiments, the ionizable lipid is 9Z,12Z)-3-((4,4-bis (octyloxy) butanoyl)oxy)-2-((((3-(diethylamino)propoxy)carbonyl)oxy)methyl)propyl octadeca-9,12-dienoate (LP01), e.g., as synthesized in Example 13 of WO2015/095340 (incorporated by reference herein in its entirety). In some embodiments, the ionizable lipid is Di((Z)-non-2-en-1-yl) 9-((4-dimethylamino)-butanoyl)oxy)heptadecanedioate (L319), e.g. as synthesized in Example 7, 8, or 9 of US2012/0027803 (incorporated by reference herein in its entirety). In some embodiments, the ionizable lipid is 1,1′-((2-(4-(2-((2-(Bis(2-hydroxydodecyl)amino)ethyl)(2-hydroxydodecyl) amino)ethyl)piperazin-1-yl)ethyl)azanediyl)bis(dodecan-2-ol) (C12-200), e.g., as synthesized in Examples 14 and 16 of WO2010/053572 (incorporated by reference herein in its entirety). In some embodiments, the ionizable lipid is Imidazole cholesterol ester (ICE) lipid (3S, 10R, 13R, 17R)-10, 13-dimethyl-17-((R)-6-methylheptan-2-yl)-2, 3, 4, 7, 8, 9, 10, 11, 12, 13, 14, 15, 16, 17-tetradecahydro-1H-cyclopenta[a]phenanthren-3-yl 3-(1H-imidazol-4-yl) propanoate, e.g., Structure (I) from WO2020/106946 (incorporated by reference herein in its entirety).

[1498] In some embodiments, an ionizable lipid may be a cationic lipid, an ionizable cationic lipid, e.g., a cationic lipid that can exist in a positively charged or neutral form depending on pH, or an amine-containing lipid that can be readily protonated. In some embodiments, the cationic lipid is a lipid capable of being positively charged, e.g., under physiological conditions. Exemplary cationic lipids include one or more amine group(s) which bear the positive charge. In some embodiments, the lipid particle comprises a cationic lipid in formulation with one or more of neutral lipids, ionizable amine-containing lipids, biodegradable alkyne lipids, steroids, phospholipids including polyunsaturated lipids, structural lipids (e.g., sterols), PEG, cholesterol and polymer conjugated lipids. In some embodiments, the cationic lipid may be an ionizable cationic lipid. An exemplary cationic lipid as disclosed herein may have an effective pKa over 6.0. In embodiments, a lipid nanoparticle may comprise a second cationic lipid having a different effective pKa (e.g., greater than the first effective pKa), than the first cationic lipid. A lipid nanoparticle may comprise between 40 and 60 mol percent of a cationic lipid, a neutral lipid, a steroid, a polymer conjugated lipid, and a therapeutic agent, e.g., a TREM described herein, encapsulated within or associated with the lipid nanoparticle. In some embodiments, the TREM is co-formulated with the cationic lipid. The TREM may be adsorbed to the surface of an LNP, e.g., an LNP comprising a cationic lipid. In some embodiments, the TREM may be encapsulated in an LNP, e.g., an LNP comprising a cationic lipid. In some embodiments, the lipid nanoparticle may comprise a targeting moiety, e.g., coated with a targeting agent. In embodiments, the LNP formulation is biodegradable. In some embodiments, a lipid nanoparticle comprising one or more lipid described herein, e.g., Formula (i), (ii), (ii), (vii) and/or (ix) encapsulates at least 1%, at least 5%, at least 10%, at least 20%, at least 30%, at least 40%, at least 50%, at least 60%, at least 70%, at least 80%, at least 90%, at least 92%, at least 95%, at least 97%, at least 98% or 100% of a TREM.

[1499] Exemplary ionizable lipids that can be used in lipid nanoparticle formulations include, without limitation, those listed in Table 1 of WO2019051289, incorporated herein by reference. Additional exemplary lipids include, without limitation, one or more of the following formulae: X of US2016/0311759; I of US20150376115 or in US2016/0376224; I, II or III of US20160151284; I, IA, II, or IIA of US20170210967; I-c of US20150140070; A of US2013/0178541; I of US2013/0303587 or US2013/0123338; I of US2015/0141678; II, III, IV, or V of US2015/0239926; I of US2017/0119904; I or II of WO2017/117528; A of US2012/0149894; A of US2015/0057373; A of WO2013/116126; A of US2013/0090372; A of US2013/0274523; A of US2013/0274504; A of US2013/0053572; A of WO2013/016058; A of WO2012/162210; I of US2008/042973; I, II, III, or IV of US2012/01287670; I or II of US2014/0200257; I, II, or III of US2015/0203446; I or III of US2015/0005363; I, IA, IB, IC, ID, II, IIA, IIB, IIC, IID, or III-XXIV of US2014/0308304; of US2013/0338210; I, II, III, or IV of WO2009/132131; A of US2012/01011478; I or XXXV of US2012/0027796; XIV or XVII of US2012/0058144; of US2013/0323269; I of US2011/0117125; I, II, or III of US2011/0256175; I, II, III, IV, V, VI, VII, VIII, IX, X, XI, XII of US2012/0202871; I, II, III, IV, V, VI, VII, VIII, X, XII, XIII, XIV, XV, or XVI of US2011/0076335; I or II of US2006/008378; I of US2013/0123338; I or X-A-Y-Z of US2015/0064242; XVI, XVII, or XVIII of US2013/0022649; I, II, or III of US2013/0116307; I, II, or III of US2013/0116307; I or II of US2010/0062967; I-X of US2013/0189351; I of US2014/0039032; V of US2018/0028664; I of US2016/0317458; I of US2013/0195920; 5, 6, or 10 of U.S. Pat. No. 10,221,127; III-3 of WO2018/081480; I-5 or I-8 of WO2020/081938; 18 or 25 of U.S. Pat. No. 9,867,888; A of US2019/0136231; II of WO2020/219876; 1 of US2012/0027803; OF-02 of US2019/0240349; 23 of U.S. Pat. No. 10,086,013; cKK-E12/A6 of Miao et al (2020); C12-200 of WO2010/053572; 7C1 of Dahlman et al (2017); 304-013 or 503-013 of Whitehead et al; TS-P4C2 of U.S. Pat. No. 9,708,628; I of WO2020/106946; I of WO2020/106946.

[1500] In some embodiments, the ionizable lipid is MC3 (6Z,9Z,28Z,3 IZ)-heptatriaconta-6,9,28,3 1-tetraen-19-yl-4-(dimethylamino) butanoate (DLin-MC3-DMA or MC3), e.g., as described in Example 9 of WO2019051289A9 (incorporated by reference herein in its entirety). In some embodiments, the ionizable lipid is the lipid ATX-002, e.g., as described in Example 10 of WO2019051289A9 (incorporated by reference herein in its entirety). In some embodiments, the ionizable lipid is (13Z,16Z)-A,A-dimethyl-3-nonyldocosa-13, 16-dien-1-amine (Compound 32), e.g., as described in Example 11 of WO2019051289A9 (incorporated by reference herein in its entirety). In some embodiments, the ionizable lipid is Compound 6 or Compound 22, e.g., as described in Example 12 of WO2019051289A9 (incorporated by reference herein in its entirety).

[1501] Exemplary non-cationic lipids include, but are not limited to, distearoyl-sn-glycero-phosphoethanolamine, distearoylphosphatidylcholine (DSPC), dioleoylphosphatidylcholine (DOPC), dipalmitoylphosphatidylcholine (DPPC), dioleoylphosphatidylglycerol (DOPG), dipalmitoylphosphatidylglycerol (DPPG), dioleoyl-phosphatidylethanolamine (DOPE), palmitoyloleoylphosphatidylcholine (POPC), palmitoyloleoylphosphatidylethanolamine (POPE), dioleoyl-phosphatidylethanolamine 4-(N-maleimidomethyl)-cyclohexane-1-carboxylate (DOPE-mal), dipalmitoyl phosphatidyl ethanolamine (DPPE), dimyristoylphosphoethanolamine (DMPE), distearoyl-phosphatidyl-ethanolamine (DSPE), monomethyl-phosphatidylethanolamine (such as 16-O-monomethyl PE), dimethyl-phosphatidylethanolamine (such as 16-O-dimethyl PE), 18-1-trans PE, 1-stearoyl-2-oleoyl-phosphatidyethanolamine (SOPE), hydrogenated soy phosphatidylcholine (HSPC), egg phosphatidylcholine (EPC), dioleoylphosphatidylserine (DOPS), sphingomyelin (SM), dimyristoyl phosphatidylcholine (DMPC), dimyristoyl phosphatidylglycerol (DMPG), distearoylphosphatidylglycerol (DSPG), dierucoylphosphatidylcholine (DEPC), palmitoyloleyolphosphatidylglycerol (POPG), dielaidoyl-phosphatidylethanolamine (DEPE), lecithin, phosphatidylethanolamine, lysolecithin, lysophosphatidylethanolamine, phosphatidylserine, phosphatidylinositol, sphingomyelin, egg sphingomyelin (ESM), cephalin, cardiolipin, phosphatidicacid, cerebrosides, dicetylphosphate, lysophosphatidylcholine, dilinoleoylphosphatidylcholine, or mixtures thereof. It is understood that other diacylphosphatidylcholine and diacylphosphatidylethanolamine phospholipids can also be used. The acyl groups in these lipids are preferably acyl groups derived from fatty acids having C10-C24 carbon chains, e.g., lauroyl, myristoyl, paimitoyl, stearoyl, or oleoyl. Additional exemplary lipids, in certain embodiments, include, without limitation, those described in Kim et al. (2020) dx.doi.org/10.1021/acs.nanolett.0c01386, incorporated herein by reference. Such lipids include, in some embodiments, plant lipids found to improve liver transfection with mRNA (e.g., DGTS).

[1502] Other examples of non-cationic lipids suitable for use in the lipid nanoparticles include, without limitation, nonphosphorous lipids such as, e.g., stearylamine, dodeeylamine, hexadecylamine, acetyl palmitate, glycerol ricinoleate, hexadecyl stereate, isopropyl myristate, amphoteric acrylic polymers, triethanolamine-lauryl sulfate, alkyl-aryl sulfate polyethyloxylated fatty acid amides, dioctadecyl dimethyl ammonium bromide, ceramide, sphingomyclin, and the like. Other non-cationic lipids are described in WO2017/099823 or US patent publication US2018/0028664, the contents of which is incorporated herein by reference in their entirety.

[1503] In some embodiments, the non-cationic lipid is oleic acid or a compound of Formula I, II, or IV of US2018/0028664, incorporated herein by reference in its entirety. The non-cationic lipid can comprise, for example, 0-30% (mol) of the total lipid present in the lipid nanoparticle. In some embodiments, the non-cationic lipid content is 5-20% (mol) or 10-15% (mol) of the total lipid present in the lipid nanoparticle. In embodiments, the molar ratio of ionizable lipid to the neutral lipid ranges from about 2:1 to about 8:1 (e.g., about 2:1, 3:1, 4:1, 5:1, 6:1, 7:1, or 8:1).

[1504] In some embodiments, the lipid nanoparticles do not comprise any phospholipids.

[1505] In some aspects, the lipid nanoparticle can further comprise a component, such as a sterol, to provide membrane integrity. One exemplary sterol that can be used in the lipid nanoparticle is cholesterol and derivatives thereof. Non-limiting examples of cholesterol derivatives include polar analogues such as 5a-choiestanol, 53-coprostanol, choiesteryl-(2′-hydroxy)-ethyl ether, choiesteryl-(4′-hydroxy)-butyl ether, and 6-ketocholestanol; non-polar analogues such as 5a-cholestane, cholestenone, 5a-cholestanone, 5p-cholestanone, and cholesteryl decanoate; and mixtures thereof. In some embodiments, the cholesterol derivative is a polar analogue, e.g., choiesteryl-(4′-hydroxy)-butyl ether. Exemplary cholesterol derivatives are described in PCT publication WO2009/127060 and US patent publication US2010/0130588, each of which is incorporated herein by reference in its entirety.

[1506] In some embodiments, the component providing membrane integrity, such as a sterol, can comprise 0-50% (mol) (e.g., 0-10%, 10-20%, 20-30%, 30-40%, or 40-50%) of the total lipid present in the lipid nanoparticle. In some embodiments, such a component is 20-50% (mol) 30-40% (mol) of the total lipid content of the lipid nanoparticle.

[1507] In some embodiments, the lipid nanoparticle can comprise a polyethylene glycol (PEG) or a conjugated lipid molecule. Generally, these are used to inhibit aggregation of lipid nanoparticles and/or provide steric stabilization. Exemplary conjugated lipids include, but are not limited to, PEG-lipid conjugates, polyoxazoline (POZ)-lipid conjugates, polyamide-lipid conjugates (such as ATTA-lipid conjugates), cationic-polymer lipid (CPL) conjugates, and mixtures thereof. In some embodiments, the conjugated lipid molecule is a PEG-lipid conjugate, for example, a (methoxy polyethylene glycol)-conjugated lipid.

[1508] Exemplary PEG-lipid conjugates include, but are not limited to, PEG-diacylglycerol (DAG) (such as 1-(monomethoxy-polyethyleneglycol)-2,3-dimyristoylglycerol (PEG-DMG)), PEG-dialkyloxypropyl (DAA), PEG-phospholipid, PEG-ceramide (Cer), a pegylated phosphatidylethanoloamine (PEG-PE), PEG succinate diacylglycerol (PEGS-DAG) (such as 4-O-(2′,3′-di (tetradecanoyloxy) propyl-1-0-(w-methoxy (polyethoxy)ethyl) butanedioate (PEG-S-DMG)), PEG dialkoxypropylcarbam, N-(carbonyl-methoxypolyethylene glycol 2000)-1,2-distearoyl-sn-glycero-3-phosphoethanolamine sodium salt, or a mixture thereof. Additional exemplary PEG-lipid conjugates are described, for example, in U.S. Pat. Nos. 5,885,613, 6,287,591, US2003/0077829, US2003/0077829, US2005/0175682, US2008/0020058, US2011/0117125, US2010/0130588, US2016/0376224, US2017/0119904, and US/099823, the contents of all of which are incorporated herein by reference in their entirety. In some embodiments, a PEG-lipid is a compound of Formula III, III-a-I, III-a-2, III-b-1, III-b-2, or V of US2018/0028664, the content of which is incorporated herein by reference in its entirety. In some embodiments, a PEG-lipid is of Formula II of US20150376115 or US2016/0376224, the content of both of which is incorporated herein by reference in its entirety. In some embodiments, the PEG-DAA conjugate can be, for example, PEG-dilauryloxypropyl, PEG-dimyristyloxypropyl, PEG-dipalmityloxypropyl, or PEG-distearyloxypropyl. The PEG-lipid can be one or more of PEG-DMG, PEG-dilaurylglycerol, PEG-dipalmitoylglycerol, PEG-disterylglycerol, PEG-dilaurylglycamide, PEG-dimyristylglycamide, PEG-dipalmitoylglycamide, PEG-disterylglycamide, PEG-cholesterol (1-[8′-(Cholest-5-en-3 [beta]-oxy) carboxamido-3′,6′-dioxaoctanyl] carbamoyl-[omega]-methyl-poly (ethylene glycol), PEG-DMB (3,4-Ditetradecoxylbenzyl-[omega]-methyl-poly (ethylene glycol) ether), and 1,2-dimyristoyl-sn-glycero-3-phosphoethanolamine-N-[methoxy (polyethylene glycol)-2000]. In some embodiments, the PEG-lipid comprises PEG-DMG, 1,2-dimyristoyl-sn-glycero-3-phosphoethanolamine-N-[methoxy (polyethylene glycol)-2000]. In some embodiments, the PEG-lipid comprises a structure selected from:

[chemical structure]

[1509] In some embodiments, lipids conjugated with a molecule other than a PEG can also be used in place of PEG-lipid. For example, polyoxazoline (POZ)-lipid conjugates, polyamide-lipid conjugates (such as ATTA-lipid conjugates), and cationic-polymer lipid (GPL) conjugates can be used in place of or in addition to the PEG-lipid.

[1510] Exemplary conjugated lipids, i.e., PEG-lipids, (POZ)-lipid conjugates, ATTA-lipid conjugates and cationic polymer-lipids are described in the PCT and LIS patent applications listed in Table 2 of WO2019051289A9, the contents of all of which are incorporated herein by reference in their entirety.

[1511] In some embodiments, the PEG or the conjugated lipid can comprise 0-20% (mol) of the total lipid present in the lipid nanoparticle. In some embodiments, PEG or the conjugated lipid content is 0.5-10% or 2-5% (mol) of the total lipid present in the lipid nanoparticle. Molar ratios of the ionizable lipid, non-cationic-lipid, sterol, and PEG/conjugated lipid can be varied as needed. For example, the lipid particle can comprise 30-70% ionizable lipid by mole or by total weight of the composition, 0-60% cholesterol by mole or by total weight of the composition, 0-30% non-cationic-lipid by mole or by total weight of the composition and 1-10% conjugated lipid by mole or by total weight of the composition. Preferably, the composition comprises 30-40% ionizable lipid by mole or by total weight of the composition, 40-50% cholesterol by mole or by total weight of the composition, and 10-20% non-cationic-lipid by mole or by total weight of the composition. In some other embodiments, the composition is 50-75% ionizable lipid by mole or by total weight of the composition, 20-40% cholesterol by mole or by total weight of the composition, and 5 to 10% non-cationic-lipid, by mole or by total weight of the composition and 1-10% conjugated lipid by mole or by total weight of the composition. The composition may contain 60-70% ionizable lipid by mole or by total weight of the composition, 25-35% cholesterol by mole or by total weight of the composition, and 5-10% non-cationic-lipid by mole or by total weight of the composition. The composition may also contain up to 90% ionizable lipid by mole or by total weight of the composition and 2 to 15% non-cationic lipid by mole or by total weight of the composition. The formulation may also be a lipid nanoparticle formulation, for example comprising 8-30% ionizable lipid by mole or by total weight of the composition, 5-30% non-cationic lipid by mole or by total weight of the composition, and 0-20% cholesterol by mole or by total weight of the composition; 4-25% ionizable lipid by mole or by total weight of the composition, 4-25% non-cationic lipid by mole or by total weight of the composition, 2 to 25% cholesterol by mole or by total weight of the composition, 10 to 35% conjugate lipid by mole or by total weight of the composition, and 5% cholesterol by mole or by total weight of the composition; or 2-30% ionizable lipid by mole or by total weight of the composition, 2-30% non-cationic lipid by mole or by total weight of the composition, 1 to 15% cholesterol by mole or by total weight of the composition, 2 to 35% conjugate lipid by mole or by total weight of the composition, and 1-20% cholesterol by mole or by total weight of the composition; or even up to 90% ionizable lipid by mole or by total weight of the composition and 2-10% non-cationic lipids by mole or by total weight of the composition, or even 100% cationic lipid by mole or by total weight of the composition. In some embodiments, the lipid particle formulation comprises ionizable lipid, phospholipid, cholesterol and a PEG-ylated lipid in a molar ratio of 50:10:38.5:1. 5. In some other embodiments, the lipid particle formulation comprises ionizable lipid, cholesterol and a PEG-ylated lipid in a molar ratio of 60:38.5:1.5.

[1512] In some embodiments, the lipid particle comprises ionizable lipid, non-cationic lipid (e.g. phospholipid), a sterol (e.g., cholesterol) and a PEG-ylated lipid, where the molar ratio of lipids ranges from 20 to 70 mole percent for the ionizable lipid, with a target of 40-60, the mole percent of non-cationic lipid ranges from 0 to 30, with a target of 0 to 15, the mole percent of sterol ranges from 20 to 70, with a target of 30 to 50, and the mole percent of PEG-ylated lipid ranges from 1 to 6, with a target of 2 to 5.

[1513] In some embodiments, the lipid particle comprises ionizable lipid/non-cationic-lipid/sterol/conjugated lipid at a molar ratio of 50:10:38.5:1.5.

[1514] In an aspect, the disclosure provides a lipid nanoparticle formulation comprising phospholipids, lecithin, phosphatidylcholine and phosphatidylethanolamine.

[1515] In some embodiments, one or more additional compounds can also be included. Those compounds can be administered separately, or the additional compounds can be included in the lipid nanoparticles of the invention. In other words, the lipid nanoparticles can contain other compounds in addition to the nucleic acid or at least a second nucleic acid, different than the first. Without limitations, other additional compounds can be selected from the group consisting of small or large organic or inorganic molecules, monosaccharides, disaccharides, trisaccharides, oligosaccharides, polysaccharides, peptides, proteins, peptide analogs and derivatives thereof, peptidomimetics, nucleic acids, nucleic acid analogs and derivatives, an extract made from biological materials, or any combinations thereof.

[1516] In some embodiments, LNPs are directed to specific tissues by the addition of targeting domains. For example, biological ligands may be displayed on the surface of LNPs to enhance interaction with cells displaying cognate receptors, thus driving association with and cargo delivery to tissues wherein cells express the receptor. In some embodiments, the biological ligand may be a ligand that drives delivery to the liver, e.g., LNPs that display GalNAc result in delivery of nucleic acid cargo to hepatocytes that display asialoglycoprotein receptor (ASGPR). The work of Akinc et al. Mol Ther 18 (7): 1357-1364 (2010) teaches the conjugation of a trivalent GalNAc ligand to a PEG-lipid (GalNAc-PEG-DSG) to yield LNPs dependent on ASGPR for observable LNP cargo effect (see, e.g., FIG. 6 of Akinc et al. 2010, supra). Other ligand-displaying LNP formulations, e.g., incorporating folate, transferrin, or antibodies, are discussed in WO2017223135, which is incorporated herein by reference in its entirety, in addition to the references used therein, namely Kolhatkar et al., Curr Drug Discov Technol. 2011 8:197-206; Musacchio and Torchilin, Front Biosci. 2011 16:1388-1412; Yu et al., Mol Membr Biol. 2010 27:286-298; Patil et al., Crit Rev Ther Drug Carrier Syst. 2008 25:1-61; Benoit et al., Biomacromolecules. 2011 12:2708-2714; Zhao et al., Expert Opin Drug Deliv. 2008 5:309-319; Akinc et al., Mol Ther. 2010 18:1357-1364; Srinivasan et al., Methods Mol Biol. 2012 820:105-116; Ben-Arie et al., Methods Mol Biol. 2012 757:497-507; Peer 2010 J Control Release. 20:63-68; Peer et al., Proc Natl Acad Sci USA. 2007 104:4095-4100; Kim et al., Methods Mol Biol. 2011 721:339-353; Subramanya et al., Mol Ther. 2010 18:2028-2037; Song et al., Nat Biotechnol. 2005 23:709-717; Peer et al., Science. 2008 319:627-630; and Peer and Lieberman, Gene Ther. 2011 18:1127-1133.

[1517] In some embodiments, LNPs are selected for tissue-specific activity by the addition of a Selective ORgan Targeting (SORT) molecule to a formulation comprising traditional components, such as ionizable cationic lipids, amphipathic phospholipids, cholesterol and poly (ethylene glycol) (PEG) lipids. The teachings of Cheng et al. Nat Nanotechnol 15(4):313-320 (2020) demonstrate that the addition of a supplemental “SORT” component precisely alters the in vivo RNA delivery profile and mediates tissue-specific (e.g., lungs, liver, spleen) gene delivery and editing as a function of the percentage and biophysical property of the SORT molecule.

[1518] In some embodiments, the LNPs comprise biodegradable, ionizable lipids. In some embodiments, the LNPs comprise (9Z,12Z)-3-((4,4-bis (octyloxy) butanoyl)oxy)-2-((((3-(diethylamino) propoxy) carbonyl)oxy) methyl) propyl octadeca-9,12-dienoate, also called 3-((4,4-bis (octyloxy) butanoyl)oxy)-2-((((3-(diethylamino) propoxy) carbonyl)oxy) methyl) propyl (9Z,12Z)-octadeca-9,12-dienoate) or another ionizable lipid. See, e.g., lipids of WO2019/067992, WO/2017/173054, WO2015/095340, and WO2014/136086, as well as references provided therein. In some embodiments, the term cationic and ionizable in the context of LNP lipids is interchangeable, e.g., wherein ionizable lipids are cationic depending on the pH.

[1519] In some embodiments, the average LNP diameter of the LNP formulation may be between 10s of nm and 100s of nm, e.g., measured by dynamic light scattering (DLS). In some embodiments, the average LNP diameter of the LNP formulation may be from about 40 nm to about 150 nm, such as about 40 nm, 45 nm, 50 nm, 55 nm, 60 nm, 65 nm, 70 nm, 75 nm, 80 nm, 85 nm, 90 nm, 95 nm, 100 nm, 105 nm, 110 nm, 115 nm, 120 nm, 125 nm, 130 nm, 135 nm, 140 nm, 145 nm, or 150 nm. In some embodiments, the average LNP diameter of the LNP formulation may be from about 50 nm to about 100 nm, from about 50 nm to about 90 nm, from about 50 nm to about 80 nm, from about 50 nm to about 70 nm, from about 50 nm to about 60 nm, from about 60 nm to about 100 nm, from about 60 nm to about 90 nm, from about 60 nm to about 80 nm, from about 60 nm to about 70 nm, from about 70 nm to about 100 nm, from about 70 nm to about 90 nm, from about 70 nm to about 80 nm, from about 80 nm to about 100 nm, from about 80 nm to about 90 nm, or from about 90 nm to about 100 nm. In some embodiments, the average LNP diameter of the LNP formulation may be from about 70 nm to about 100 nm. In a particular embodiment, the average LNP diameter of the LNP formulation may be about 80 nm. In some embodiments, the average LNP diameter of the LNP formulation may be about 100 nm. In some embodiments, the average LNP diameter of the LNP formulation ranges from about 1 mm to about 500 mm, from about 5 mm to about 200 mm, from about 10 mm to about 100 mm, from about 20 mm to about 80 mm, from about 25 mm to about 60 mm, from about 30 mm to about 55 mm, from about 35 mm to about 50 mm, or from about 38 mm to about 42 mm.

[1520] A LNP may, in some instances, be relatively homogenous. A polydispersity index may be used to indicate the homogeneity of a LNP, e.g., the particle size distribution of the lipid nanoparticles. A small (e.g., less than 0.3) polydispersity index generally indicates a narrow particle size distribution. A LNP may have a polydispersity index from about 0 to about 0.25, such as 0.01, 0.02, 0.03, 0.04, 0.05, 0.06, 0.07, 0.08, 0.09, 0.10, 0.11, 0.12, 0.13, 0.14, 0.15, 0.16, 0.17, 0.18, 0.19, 0.20, 0.21, 0.22, 0.23, 0.24, or 0.25. In some embodiments, the polydispersity index of a LNP may be from about 0.10 to about 0.20.

[1521] The zeta potential of a LNP may be used to indicate the electrokinetic potential of the composition. In some embodiments, the zeta potential may describe the surface charge of an LNP. Lipid nanoparticles with relatively low charges, positive or negative, are generally desirable, as more highly charged species may interact undesirably with cells, tissues, and other elements in the body. In some embodiments, the zeta potential of a LNP may be from about −10 mV to about +20 mV, from about −10 mV to about +15 mV, from about −10 mV to about +10 mV, from about −10 mV to about +5 mV, from about −10 mV to about 0 mV, from about −10 mV to about −5 mV, from about −5 mV to about +20 mV, from about −5 mV to about +15 mV, from about −5 mV to about +10 mV, from about −5 mV to about +5 mV, from about −5 mV to about 0 mV, from about 0 mV to about +20 mV, from about 0 mV to about +15 mV, from about 0 mV to about +10 mV, from about 0 mV to about +5 mV, from about +5 mV to about +20 mV, from about +5 mV to about +15 mV, or from about +5 mV to about +10 mV.

[1522] The efficiency of encapsulation of a TREM describes the amount of TREM that is encapsulated or otherwise associated with a LNP after preparation, relative to the initial amount provided. The encapsulation efficiency is desirably high (e.g., close to 100%). The encapsulation efficiency may be measured, for example, by comparing the amount of TREM in a solution containing the lipid nanoparticle before and after breaking up the lipid nanoparticle with one or more organic solvents or detergents. An anion exchange resin may be used to measure the amount of free protein or nucleic acid (e.g., RNA) in a solution. Fluorescence may be used to measure the amount of free TREM in a solution. For the lipid nanoparticles described herein, the encapsulation efficiency of a TREM may be at least 50%, for example 50%, 55%, 60%, 65%, 70%, 75%, 80%, 85%, 90%, 91%, 92%, 93%, 94%, 95%, 96%, 97%, 98%, 99%, or 100%. In some embodiments, the encapsulation efficiency may be at least 80%. In some embodiments, the encapsulation efficiency may be at least 90%. In some embodiments, the encapsulation efficiency may be at least 95%.

[1523] A LNP may optionally comprise one or more coatings. In some embodiments, a LNP may be formulated in a capsule, film, or table having a coating. A capsule, film, or tablet including a composition described herein may have any useful size, tensile strength, hardness or density.

[1524] Additional exemplary lipids, formulations, methods, and characterization of LNPs are taught by WO2020061457, which is incorporated herein by reference in its entirety.

[1525] In some embodiments, in vitro or ex vivo cell lipofections are performed using Lipofectamine MessengerMax (Thermo Fisher) or TransIT-mRNA Transfection Reagent (Mirus Bio). In certain embodiments, LNPs are formulated using the GenVoy_ILM ionizable lipid mix (Precision NanoSystems). In certain embodiments, LNPs are formulated using 2,2-dilinoleyl-4-dimethylaminoethyl-[1,3]-dioxolane (DLin-KC2-DMA) or dilinoleylmethyl-4-dimethylaminobutyrate (DLin-MC3-DMA or MC3), the formulation and in vivo use of which are taught in Jayaraman et al. Angew Chem Int Ed Engl 51 (34): 8529-8533 (2012), incorporated herein by reference in its entirety.

[1526] LNP formulations optimized for the delivery of CRISPR-Cas systems, e.g., Cas9-gRNA RNP, gRNA, Cas9 mRNA, are described in WO2019067992 and WO2019067910, both incorporated by reference.

[1527] Additional specific LNP formulations useful for delivery of nucleic acids are described in U.S. Pat. Nos. 8,158,601 and 8,168,775, both incorporated by reference, which include formulations used in patisiran, sold under the name ONPATTRO.

[1528] Exosomes can also be used as drug delivery vehicles for the TREM, TREM core fragment, TREM fragment, or TREM compositions or pharmaceutical TREM composition described herein. For a review, see Ha et al. July 2016. Acta Pharmaceutica Sinica B. Volume 6, Issue 4, Pages 287-296; https://doi.org/10.1016/j.apsb.2016.02.001.

[1529] Ex vivo differentiated red blood cells can also be used as a carrier for a TREM, TREM core fragment, TREM fragment, or TREM composition, or pharmaceutical TREM composition described herein. See, e.g., WO2015073587; WO2017123646; WO2017123644; WO2018102740; wO2016183482; WO2015153102; WO2018151829; WO2018009838; Shi et al. 2014. Proc Natl Acad Sci USA. 111 (28): 10131-10136; U.S. Pat. No. 9,644,180; Huang et al. 2017. Nature Communications 8:423; Shi et al. 2014. Proc Natl Acad Sci USA. 111 (28): 10131-10136.

[1530] Fusosome compositions, e.g., as described in WO2018208728, can also be used as carriers to deliver the TREM, TREM core fragment, TREM fragment, or TREM composition, or pharmaceutical TREM composition described herein.

[1531] Virosomes and virus-like particles (VLPs) can also be used as carriers to deliver a TREM, TREM core fragment, TREM fragment, or TREM composition, or pharmaceutical TREM composition described herein to targeted cells.

[1532] Plant nanovesicles, e.g., as described in WO2011097480A1, WO2013070324A1, or WO2017004526A1 can also be used as carriers to deliver the TREM, TREM core fragment, TREM fragment, or TREM composition, or pharmaceutical TREM composition described herein.

Delivery without a Carrier

[1533] A TREM, a TREM core fragment or a TREM fragment, a TREM composition or a pharmaceutical TREM composition described herein can be administered to a cell without a carrier, e.g., via naked delivery of the TREM, a TREM core fragment or a TREM fragment, a TREM composition or a pharmaceutical TREM composition.

[1534] In some embodiments, naked delivery as used herein refers to delivery without a carrier. In some embodiments, delivery without a carrier, e.g., naked delivery, comprises delivery with a moiety, e.g., a targeting peptide.

[1535] In some embodiments, a TREM, a TREM core fragment or a TREM fragment, or TREM composition, or pharmaceutical TREM composition described herein is delivered to a cell without a carrier, e.g., via naked delivery. In some embodiments, the delivery without a carrier, e.g., naked delivery, comprises delivery with a moiety, e.g., a targeting peptide.

### Use of TREMs

[1536] A composition comprising a TREM comprising an ASGPR binding moiety (e.g., a pharmaceutical TREM composition described herein) can modulate a function in a cell, tissue or subject. In embodiments, a composition comprising a TREM comprising an ASGPR binding moiety (e.g., a pharmaceutical TREM composition) described herein is contacted with a cell or tissue, or administered to a subject in need thereof, in an amount and for a time sufficient to modulate (increase or decrease) one or more of the following parameters: adaptor function (e.g., cognate or non-cognate adaptor function), e.g., the rate, efficiency, robustness, and/or specificity of initiation or elongation of a polypeptide chain; ribosome binding and/or occupancy; regulatory function (e.g., gene silencing or signaling); cell fate; mRNA stability; protein stability; protein transduction; protein compartmentalization. A parameter may be modulated, e.g., by at least 5% (e.g., at least 10%, 15%, 20%, 25%, 30%, 40%, 50%, 60%, 70%, 80%, 90%, 100%, 150%, 200% or more) compared to a reference tissue, cell or subject (e.g., a healthy, wild-type or control cell, tissue or subject).

[1537] In another aspect, the disclosure provides a method of treating a subject having an endogenous open reading frame (ORF) which comprises a premature termination codon (PTC), comprising providing a TREM composition comprising a TREM, a TREM core fragment, or a TREM fragment disclosed herein, wherein the TREM comprises an anticodon that pairs with the PTC in the ORF; contacting the subject with the composition comprising a TREM, TREM core fragment or TREM fragment in an amount and/or for a time sufficient to treat the subject, thereby treating the subject. In an embodiment, the PTC comprises UAA, UGA or UAG.

[1538] In another aspect, the disclosure provides a method of treating a subject having an disease or disorder associated with a premature termination codon (PTC), comprising providing a TREM composition comprising a TREM, a TREM core fragment, or a TREM fragment disclosed herein; contacting the subject with the composition comprising a TREM, TREM core fragment or TREM fragment in an amount and/or for a time sufficient to treat the subject, thereby treating the subject. In an embodiment, the PTC comprises UAA, UGA or UAG. In an embodiment, the disease or disorder associated with a PTC is a disease or disorder described herein, e.g., a cancer or a monogenic disease.

[1539] In an embodiment of any of the methods disclosed herein, the codon having the first sequence comprises a mutation (e.g., a point mutation, e.g., a nonsense mutation), resulting in a premature termination codon (PTC) chosen from UAA, UGA or UAG. In an embodiment, the codon having the first sequence or the PTC comprises a UAA mutation. In an embodiment, the codon having the first sequence or the PTC comprises a UGA mutation. In an embodiment, the codon having the first sequence or the PTC comprises a UAG mutation.

[1540] In another aspect, the disclosure provides a method of making a TREM, a TREM core fragment, or a TREM fragment disclosed herein, comprising linking a first nucleotide to a second nucleotide to form the TREM.

[1541] In an embodiment, the TREM, TREM core fragment or TREM fragment is non-naturally occurring (e.g., synthetic).

[1542] In an embodiment, the TREM, TREM core fragment or TREM fragment is made by cell-free solid phase synthesis.

[1543] In another aspect, the disclosure provides a method of modulating a tRNA pool in a cell comprising: providing a TREM, a TREM core fragment, or a TREM fragment disclosed herein, and contacting the cell with the TREM, TREM core fragment or TREM fragment, thereby modulating the tRNA pool in the cell.

[1544] In an aspect, the disclosure provides a method of contacting a cell, tissue, or subject with a TREM, a TREM core fragment, or a TREM fragment disclosed herein, comprising: contacting the cell, tissue or subject with the TREM, TREM core fragment or TREM fragment, thereby contacting the cell, tissue, or subject with the TREM, TREM core fragment or TREM fragment.

[1545] In another aspect, the disclosure provides a method of delivering a TREM, TREM core fragment or TREM fragment to a cell, tissue, or subject, comprising: providing a cell, tissue, or subject, and contacting the cell, tissue, or subject, a TREM, a TREM core fragment, or a TREM fragment disclosed herein.

[1546] In an aspect, the disclosure provides a method of modulating a tRNA pool in a cell comprising an endogenous open reading frame (ORF), which ORF comprises a codon having a first sequence, comprising:
[1547] optionally, acquiring knowledge of the abundance of one or both of (i) and (ii), e.g., acquiring knowledge of the relative amounts of: (i) and (ii) in the cell, wherein (i) is a tRNA moiety having an anticodon that pairs with the codon of the ORF having a first sequence (the first tRNA moiety) and (ii) is an isoacceptor tRNA moiety having an anticodon that pairs with a codon other than the codon having the first sequence (the second tRNA moiety) in the cell;
[1548] contacting the cell with a TREM, a TREM core fragment, or a TREM fragment disclosed herein, wherein the TREM, TREM core fragment or TREM fragment has an anticodon that pairs with: the codon having the first sequence; or the codon other than the codon having the first sequence, in an amount and/or for a time sufficient to modulate the relative amounts of the first tRNA moiety and the second tRNA moiety in the cell,
[1549] thereby modulating the tRNA pool in the cell.

[1550] In another aspect, the disclosure provides a method of modulating a tRNA pool in a subject having an ORF, which ORF comprises a codon having a first sequence, comprising:
[1551] optionally, acquiring knowledge of the abundance of one or both of (i) and (ii), e.g., acquiring knowledge of the relative amounts of: (i) and (ii) in the subject, wherein (i) is a tRNA moiety having an anticodon that pairs with the codon of the ORF having a first sequence (the first tRNA moiety) and (ii) is an isoacceptor tRNA moiety having an anticodon that pairs with a codon other than the codon having the first sequence (the second tRNA moiety) in the subject;
[1552] contacting the subject with a TREM, a TREM core fragment, or a TREM fragment disclosed herein, wherein the TREM, TREM core fragment or TREM fragment has an anticodon that pairs with: the codon having the first sequence; or the codon other than the codon having the first sequence, in an amount and/or for a time sufficient to modulate the relative amounts of the first tRNA moiety and the second tRNA moiety in the subject,
[1553] thereby modulating the tRNA pool in the subject.

[1554] All references and publications cited herein are hereby incorporated by reference.

### ENUMERATED EMBODIMENTS

[1555] 1. A TREM entity comprising an asialoglycoprotein receptor (ASGPR) binding moiety, wherein the ASGPR binding moiety is bound to:
   [1556] a) a sugar moiety (e.g., ribose moiety);
   [1557] b) a nucleobase (e.g., A, G, C, or U); and/or
   [1558] c) a phosphate backbone
[1559] at any nucleotide position within the TREM.
[1560] 2. The TREM entity of embodiment 1, wherein the asialoglycoprotein receptor binding moiety comprises a galactose (Gal), galactosaminic (GalNH₂), or N-acetylgalactosamine (GalNAc) moiety.
[1561] 3. The TREM entity of embodiment 2, wherein the GalNAc moiety comprises GalNAc or an analog thereof.
[1562] 4. The TREM entity of embodiment 1, wherein the ASGPR binding moiety is bound to a sugar moiety (e.g., ribose moiety) at the 2′ or 4′ position of the sugar moiety.
[1563] 5. The TREM entity of embodiment 1, wherein the ASGPR binding moiety is bound to a nucleobase (e.g., A, G, C or U).
[1564] 6. The TREM entity of embodiment 1, wherein the sugar moiety (e.g., ribose moiety), nucleobase, and/or the phosphate backbone are within the L1 region of a TREM sequence.
[1565] 7. The TREM entity of any one of embodiments 1-6, wherein the sugar moiety (e.g., ribose moiety), nucleobase, and/or the phosphate backbone are within the ASt Domain 1 of a TREM sequence.
[1566] 8. The TREM entity of any one of embodiments 1-6, wherein the sugar moiety (e.g., ribose moiety), nucleobase, and/or the phosphate backbone are within the ASt Domain 2 of a TREM sequence.
[1567] 9. The TREM entity of any one of embodiments 1-6, wherein the sugar moiety (e.g., ribose moiety), nucleobase, and/or the phosphate backbone are within the L2 region of a TREM sequence.
[1568] 10. The TREM entity of any one of embodiments 1-6, wherein the sugar moiety (e.g., ribose moiety), nucleobase, and/or the phosphate backbone are within the DH Domain of a TREM sequence.
[1569] 11. The TREM entity of any one of embodiments 1-6, wherein the sugar moiety (e.g., ribose moiety), nucleobase, and/or the phosphate backbone are within the L3 region of a TREM sequence.
[1570] 12. The TREM entity of any one of embodiments 1-6, wherein the sugar moiety (e.g., ribose moiety), nucleobase, and/or the phosphate backbone are within the ACH Domain of a TREM sequence.
[1571] 13. The TREM entity of any one of embodiments 1-6, wherein the sugar moiety (e.g., ribose moiety) and/or the phosphate backbone are within the VL Domain of a TREM sequence.
[1572] 14. The TREM entity of any one of embodiments 1-6, wherein the sugar moiety (e.g., ribose moiety), nucleobase, and/or the phosphate backbone are within the TH Domain of a TREM sequence.
[1573] 15. The TREM entity of any one of embodiments 1-6, wherein the sugar moiety (e.g., ribose moiety), nucleobase, and/or the phosphate backbone are within the L⁴ region of a TREM sequence.
[1574] 16. The TREM entity of any one of embodiments 1-15, wherein the TREM entity comprises a TREM, a TREM Core Fragment, or a TREM Fragment.
[1575] 17. A TREM comprising:
   [1576] (i) a sequence of Formula A comprising:
   [1577] [L1]_{y}-[ASt Domain1]ₓ-[L2]ₓ-[DH Domain]ₓ-[L3]ₓ-[ACH Domain]ₓ-[VL Domain]_{y}-[TH Domain]ₓ-[L4]ₓ-[ASt Domain2]ₓ, (A); and
   [1578] (ii) an asialoglycoprotein receptor (ASGPR) binding moiety (e.g., a GalNAc moiety, e.g., GalNAc);
   [1579] wherein the ASGPR binding moiety is bound to:
      [1580] a) a sugar moiety (e.g., ribose moiety);
      [1581] b) a nucleobase (e.g., A, G, C, or U); and/or
      [1582] c) the phosphate backbone
   [1583] wherein y is 0 or 1 and x is 1.
[1584] 18. The TREM of embodiment 17, wherein the ASGPR binding moiety is bound to a sugar moiety (e.g., a ribose moiety).
[1585] 19. The TREM of embodiment 18, wherein the ASGPR binding moiety is present on the sugar moiety at the 2′ or 4′ position of the sugar moiety.
[1586] 20. The TREM of embodiment 18, wherein the ASGPR binding moiety is present on a nucleobase (e.g., A, G, C, or U).
[1587] 21. The TREM of embodiment 17, wherein the ASGPR binding moiety is bound to the phosphate backbone at any nucleotide position within the TREM.
[1588] 22. The TREM of any one of embodiments 1-17, wherein the ASGPR binding moiety is bound to a sugar moiety (e.g., ribose moiety) within the ASt Domain 1.
[1589] 23. The TREM of any one of embodiments 1-17, wherein the ASGPR binding moiety is bound to a sugar moiety (e.g., ribose moiety) at any one of positions 1-9 within the TREM.
[1590] 24. The TREM of embodiment 23, wherein the ASGPR binding moiety is present on the sugar moiety (e.g., the ribose moiety) at the 2′ or 4′ position of the sugar moiety.
[1591] 25. The TREM of embodiment 23, wherein the ASGPR binding moiety is present on a nucleobase (e.g., A, G, or U).
[1592] 26. The TREM of any one of embodiments 1-17, wherein the ASGPR binding moiety is bound to the phosphate backbone at any one of positions 1-9 within the TREM.
[1593] 27. The TREM of embodiment 17, wherein the ASGPR binding moiety is bound to a sugar moiety (e.g., ribose moiety) within the ASt Domain 2.
[1594] 28. The TREM of any one of embodiments 1-27, wherein the ASGPR binding moiety is bound to a sugar moiety (e.g., ribose moiety) at any one of positions 65-76 within the TREM.
[1595] 29. The TREM of embodiment 28, wherein the ASGPR binding moiety is present on the sugar moiety (e.g., the ribose moiety) at the 2′ oxygen or carbon or 4′ carbon of the sugar moiety.
[1596] 30. The TREM of embodiment 28, wherein the ASGPR binding moiety is present a nucleobase (e.g., A, G, C, U).
[1597] 31. The TREM of any one of embodiments 1-27, wherein the ASGPR binding moiety is bound to the phosphate backbone at any nucleotide position at any one of positions 65-76 within the TREM.
[1598] 32. The TREM of any one of embodiments 1-17, wherein the ASGPR binding is bound to a sugar moiety (e.g., a ribose moiety) within the ACH Domain.
[1599] 33. The TREM of embodiment 32, wherein the ASGPR binding moiety is bound to a sugar moiety (e.g., ribose moiety) at any one of positions 27-43 within the TREM.
[1600] 34. The TREM of any one of embodiments 32 or 33, wherein the ASGPR binding moiety is present on the sugar moiety (e.g., the ribose moiety) at the 2′ or 4′ position of the sugar moiety.
[1601] 35. The TREM of embodiment 33, wherein the ASGPR binding moiety is present on a nucleobase (e.g., A, G, C, or U).
[1602] 36. The TREM of any one of embodiments 1-17, wherein the ASGPR binding moiety is bound to the phosphate backbone at any one of positions 27-43 within the TREM.
[1603] 37. The TREM of any one of embodiments 1-17, wherein the ASGPR binding moiety is present within the DHD.
[1604] 38. The TREM of embodiment 37, wherein the ASGPR binding moiety is bound to a sugar moiety (e.g., ribose moiety) of a nucleotide in the DHD.
[1605] 39. The TREM of embodiment 38, wherein the ASGPR binding moiety is bound to a sugar moiety (e.g., ribose moiety) of a nucleotide at positions 10-26 within a TREM sequence.
[1606] 40. The TREM of any one of embodiments 38 or 39, wherein the ASGPR binding moiety is present on the sugar moiety (e.g., the ribose moiety) at the 2′ or 4′ position of the sugar moiety.
[1607] 41. The TREM of any one of embodiments 38 and 39, wherein the ASGPR binding moiety is present on a nucleobase (e.g., A, G, C, or U).
[1608] 42. The TREM of any one of embodiments 1-17, wherein the ASGPR binding moiety is bound to the phosphate backbone at any one of positions 27-43 within the TREM.
[1609] 43. The TREM of any one of embodiments 1-17, wherein the ASGPR binding moiety is present on the sugar moiety (e.g., the ribose moiety) of a nucleotide or the phosphate backbone within a linker region.
[1610] 44. The TREM of embodiment 43, wherein the linker region is L1, L2, L3, and/or L4.
[1611] 45. The TREM of any one of embodiments 1-44, wherein the ASGPR binding moiety (e.g., a GalNAc moiety, e.g., GalNAc) is coupled to a sugar moiety (e.g., ribose moiety) of a nucleotide of the TREM molecule via a covalent linkage (e.g., at a nitrogen or carbon atom in the sugar moiety).
[1612] 46. The TREM of any one of embodiments 1-45, wherein the ASGPR binding moiety (e.g., a GalNAc moiety, e.g., GalNAc) is coupled to the phosphate backbone of a nucleotide of the TREM molecule via a covalent linkage.
[1613] 47. The TREM of any one of embodiments 1-45, wherein the ASGPR binding moiety is bound to a carbon atom or an oxygen atom within the sugar moiety (e.g., ribose moiety).
[1614] 48. The TREM of any one of embodiments 1-45, wherein the ASGPR binding moiety is bound to the 2′-oxygen or carbon atom within the sugar moiety (e.g., ribose moiety).
[1615] 49. The TREM molecule of any one of embodiments 1-48, wherein the ASGPR binding moiety comprises a GalNAc moiety (e.g., a GalNAc or a GalNAc analog).
[1616] 50. The TREM molecule of any one of embodiments 1-49, wherein the ASGPR binding moiety comprises a plurality of GalNAc moieties.
[1617] 51. The TREM molecule of any one of embodiments 1-50, wherein the ASGPR binding moiety comprises a structure of Formula (I):

[chemical structure]

[1618] or a salt thereof, wherein:
   [1619] each of X and Y is independently O, N (R⁷), or S;
   [1620] each of R¹, R³, R⁴, and R⁵ are independently hydrogen, alkyl, alkenyl, alkynyl, heteroalkyl, haloalkyl, aryl, heteroaryl, cycloalkyl, heterocyclyl, C(O)-alkyl, C(O)-alkenyl, C(O)-alkynyl, C(O)-heteroalkyl, C(O)-haloalkyl, C(O)-aryl, C(O)-heteroaryl, C(O)-cycloalkyl, or C(O)-heterocyclyl, wherein each alkyl, alkenyl, alkynyl, heteroalkyl, haloalkyl, aryl, heteroaryl, cycloalkyl, and heterocyclyl is optionally substituted with one or more R⁸;
   [1621] or R³ and R⁴ are taken together with the oxygen atoms to which they are connected to form a heterocyclyl ring optionally substituted with one or more R⁸;
   [1622] R^{2a} is hydrogen or alkyl; R^{2b} is —C(O)alkyl (e.g., C(O)CH₃);
   [1623] each of R^{6a} and R^{6b} is hydrogen, alkyl, alkenyl, alkynyl, heteroalkyl, haloalkyl, halo, cyano, nitro,-ORA, aryl, heteroaryl, cycloalkyl, or heterocyclyl, wherein each alkyl, alkenyl, alkynyl, heteroalkyl, haloalkyl, aryl, heteroaryl, cycloalkyl, and heterocyclyl is optionally substituted with one or more R⁹;
   [1624] R⁷ is hydrogen, alkyl, or C(O)-alkyl;
   [1625] each of R⁸ and R⁹ is independently hydrogen, halo, cyano, alkyl, alkenyl, alkynyl, heteroalkyl, haloalkyl, cycloalkyl, or heterocyclyl;
   [1626] R^{A} is hydrogen, or alkyl, alkenyl, alkynyl, and n is an integer between 0 and 6, wherein the structure of Formula (I) may be connected to a linker or TREM at:
   [1627] (a) a sugar moiety (e.g., a ribose)
   [1628] (b) a nucleobase (e.g., A, G, C, or U); and/or
   [1629] (c) the phosphate backbone at any nucleotide position
   [1630] within a TREM sequence.
[1631] 52. The TREM of embodiment 51, wherein the GalNAc moiety comprises a plurality of structures of Formula (I).
[1632] 53. The TREM of embodiment 51 or 52, wherein the GalNAc moiety further comprises a linker.
[1633] 54. The TREM of any one of embodiments 1-53, wherein the ASGPR binding moiety comprises a structure of Formula (I-a):

[chemical structure]

[1634] or a salt thereof, wherein:
   [1635] R^{2a} is hydrogen or alkyl;
   [1636] R^{2b} is —C(O)alkyl (e.g., C(O)CH₃);
   [1637] each of R³, R⁴, and R⁵ are independently hydrogen, alkyl, alkenyl, alkynyl, heteroalkyl, haloalkyl, aryl, heteroaryl, cycloalkyl, heterocyclyl, C(O)-alkyl, C(O)-alkenyl, C(O)-alkynyl, C(O)-heteroalkyl, C(O)-haloalkyl, C(O)-aryl, C(O)-heteroaryl, C(O)-cycloalkyl, or C(O)-heterocyclyl, wherein each alkyl, alkenyl, alkynyl, heteroalkyl, haloalkyl, aryl, heteroaryl, cycloalkyl, and heterocyclyl is optionally substituted with one or more R⁸; and
   [1638] R⁸ is hydrogen, halo, cyano, alkyl, alkenyl, alkynyl, heteroalkyl, haloalkyl, cycloalkyl, or heterocyclyl,
   [1639] wherein the “ [symbol] ” represents a bond in any configuration, and “ [symbol] ” represents an attachment point to a linker, nucleobase, or a sugar moiety of a TREM.
[1640] 55. The TREM of any one of embodiments 1-50, wherein the ASGPR binding moiety comprises a structure of Formula (II):

[chemical structure]

[1641] or a salt thereof, wherein:
   [1642] X is O, N (R⁷), or S;
   [1643] each of W or Y is independently O or C (R^{10a})(R^{10b}), wherein one of W and Y is O;
   [1644] each of R¹, R³, R⁴, and R⁵ are independently hydrogen, alkyl, alkenyl, alkynyl, heteroalkyl, haloalkyl, aryl, heteroaryl, cycloalkyl, heterocyclyl, C(O)-alkyl, C(O)-alkenyl, C(O)-alkynyl, C(O)-heteroalkyl, C(O)-haloalkyl, C(O)-aryl, C(O)-heteroaryl, C(O)-cycloalkyl, or C(O)-heterocyclyl, wherein each alkyl, alkenyl, alkynyl, heteroalkyl, haloalkyl, aryl, heteroaryl, cycloalkyl, and heterocyclyl is optionally substituted with one or more R⁸;
   [1645] or R³ and R⁴ are taken together with the oxygen atoms to which they are connected to form a heterocyclyl ring optionally substituted with one or more R⁸;
   [1646] R^{2a} is hydrogen or alkyl; R^{2b} is —C(O)alkyl (e.g., C(O)CH₃);
   [1647] each of R^{6a} and R^{6b} is hydrogen, alkyl, alkenyl, alkynyl, heteroalkyl, haloalkyl, halo, cyano, nitro,-ORA, aryl, heteroaryl, cycloalkyl, or heterocyclyl, wherein each alkyl, alkenyl, alkynyl, heteroalkyl, haloalkyl, aryl, heteroaryl, cycloalkyl, and heterocyclyl is optionally substituted with one or more R⁹; R⁷ is hydrogen, alkyl, or C(O)-alkyl;
   [1648] each of R⁸ and R⁹ is independently hydrogen, halo, cyano, alkyl, alkenyl, alkynyl, heteroalkyl, haloalkyl, cycloalkyl, or heterocyclyl; each of R^{10a} and R^{10b} is independently hydrogen, heteroalkyl, haloalkyl, or halo; and RA is hydrogen, or alkyl, alkenyl, alkynyl,
   [1649] wherein the structure of Formula (I) may be connected to a linker or a TREM at:
   [1650] (a) a sugar moiety;
   [1651] (b) a nucleobase; and/or
   [1652] (c) the phosphate backbone at any nucleotide position.
[1653] 56. The TREM of any one of embodiments 1-50, wherein the ASGPR binding moiety comprises a structure of Formula (II):

[chemical structure]

[1654] or a salt thereof, wherein X is O, N (R⁷), or S;
   [1655] each of R¹, R³, R⁴, and R⁵ are independently hydrogen, alkyl, alkenyl, alkynyl, heteroalkyl, haloalkyl, aryl, heteroaryl, cycloalkyl, heterocyclyl, C(O)-alkyl, C(O)-alkenyl, C(O)-alkynyl, C(O)-heteroalkyl, C(O)-haloalkyl, C(O)-aryl, C(O)-heteroaryl, C(O)-cycloalkyl, or C(O)-heterocyclyl, wherein each alkyl, alkenyl, alkynyl, heteroalkyl, haloalkyl, aryl, heteroaryl, cycloalkyl, and heterocyclyl is optionally substituted with one or more R⁸;
   [1656] or R³ and R⁴ are taken together with the oxygen atoms to which they are connected to form a heterocyclyl ring optionally substituted with one or more R⁸;
   [1657] R^{2a} is hydrogen or alkyl; R^{2b} is —C(O)alkyl (e.g., C(O)CH₃); each of R^{6a} and R^{6b} is hydrogen, alkyl, alkenyl, alkynyl, heteroalkyl, haloalkyl, halo, cyano, nitro,-ORA, aryl, heteroaryl, cycloalkyl, or heterocyclyl, wherein each alkyl, alkenyl, alkynyl, heteroalkyl, haloalkyl, aryl, heteroaryl, cycloalkyl, and heterocyclyl is optionally substituted with one or more R⁹;
   [1658] R⁷ is hydrogen, alkyl, or C(O)-alkyl;
   [1659] each of R⁸ and R⁹ is independently hydrogen, halo, cyano, alkyl, alkenyl, alkynyl, heteroalkyl, haloalkyl, cycloalkyl, or heterocyclyl; and RA is hydrogen, or alkyl, alkenyl, alkynyl,
   [1660] wherein the structure of Formula (I) may be connected to a linker or TREM at
   [1661] (a) a sugar moiety;
   [1662] (b) a nucleobase; and/or
   [1663] (c) the phosphate backbone at any nucleotide position.
[1664] 57. The TREM of any one of embodiments 1-50, wherein the ASGPR binding moiety comprises a structure of Formula (II-b):

[chemical structure]

[1665] or a salt thereof, wherein:
   [1666] X is O, N (R⁷), or S;
   [1667] each of R¹, R³, R⁴, and R⁵ are independently hydrogen, alkyl, alkenyl, alkynyl, heteroalkyl, haloalkyl, aryl, heteroaryl, cycloalkyl, heterocyclyl, C(O)-alkyl, C(O)-alkenyl, C(O)-alkynyl, C(O)-heteroalkyl, C(O)-haloalkyl, C(O)-aryl, C(O)-heteroaryl, C(O)-cycloalkyl, or C(O)-heterocyclyl, wherein each alkyl, alkenyl, alkynyl, heteroalkyl, haloalkyl, aryl, heteroaryl, cycloalkyl, and heterocyclyl is optionally substituted with one or more R⁸;
   [1668] or R³ and R⁴ are taken together with the oxygen atoms to which they are connected to form a heterocyclyl ring optionally substituted with one or more R⁸;
   [1669] R^{2a} is hydrogen or alkyl; R^{2b} is —C(O)alkyl (e.g., C(O)CH₃);
   [1670] each of R^{6a} and R^{6b} is hydrogen, alkyl, alkenyl, alkynyl, heteroalkyl, haloalkyl, halo, cyano, nitro,-ORA, aryl, heteroaryl, cycloalkyl, or heterocyclyl, wherein each alkyl, alkenyl, alkynyl, heteroalkyl, haloalkyl, aryl, heteroaryl, cycloalkyl, and heterocyclyl is optionally substituted with one or more R⁹;
   [1671] R⁷ is hydrogen, alkyl, or C(O)-alkyl; each of R⁸ and R⁹ is independently hydrogen, halo, cyano, alkyl, alkenyl, alkynyl, heteroalkyl, haloalkyl, cycloalkyl, or heterocyclyl; and
   [1672] R^{A} is hydrogen, or alkyl, alkenyl, alkynyl, wherein the structure of Formula (I) may be connected to a linker or a TREM at:
   [1673] (a) a sugar moiety;
   [1674] (b) a nucleobase; and/or
   [1675] (c) the phosphate backbone at any nucleotide position.
[1676] 58. The TREM of any one of embodiments 1-50, wherein the ASGPR binding moiety comprises a structure of Formula (III):

[chemical structure]

[1677] or a salt thereof, wherein each of R¹, R2a, R2b, R³, R⁴, R⁵, R^{6a}, and R^{6b} and subvariables thereof are as defined for Formula (I), L is a linker, and n is an integer between 1 and 100, wherein “ [symbol] ” represents an attachment point to a branching point, additional linker, nucleobase, or a sugar of a TREM.
[1678] 59. The TREM of embodiment 58, wherein L comprises an alkylene, alkenylene, alkynylene, heteroalkylene, or haloalkylene group.
[1679] 60. The TREM of embodiment 58 or 59, wherein L comprises a carbonyl, amide, amine, or ester moiety.
[1680] 61. The TREM of any one of embodiments 1-50, wherein the ASGPR binding moiety comprises a structure of Formula (III-a):

[chemical structure]

[1681] or a salt thereof, wherein:
   [1682] each of R¹, R^{2a}, R^{2b}, R³, R⁴, R⁵, R^{6a}, and R^{6b} and subvariables thereof are as defined for Formula (I), each of L¹ and L² is independently a linker, each of m and n is independently an integer between 1 and 100, and M is a linker, wherein “ [symbol] ” represents an attachment point to a branching point, additional linker, nucleobase, or a sugar of a TREM.
[1683] 62. The TREM of any one of embodiments 1-50, wherein the ASGPR binding moiety comprises a structure of Formula (II-b):

[chemical structure]

[1684] or a salt thereof, wherein:
   [1685] each of R¹, R^{2a}, R^{2b}, R³, R⁴, R⁵, R^{6a}, and R^{6b} and subvariables thereof are as defined for Formula (I);
   [1686] each of L¹, L², and L³ is independently a linker;
   [1687] each of m, n, and o is independently an integer between 1 and 100;
   [1688] and M is a branching point, wherein “ [symbol] ” represents an attachment point to a branching point, additional linker, nucleobase, or a sugar of aTREM.
[1689] 63. The TREM of any one of embodiments 61 or 62, wherein each of L¹, L², and optionally L³ independently comprises an alkylene, alkenylene, alkynylene, heteroalkylene, or haloalkylene group.
[1690] 64. The TREM of any one of embodiments 61-63, wherein each of L¹, L², and optionally L³ independently comprises a carbonyl, amide, amine, or ester moiety.
[1691] 65. The TREM of any one of embodiments 61-64, wherein M comprises an alkylene, alkenylene, alkynylene, heteroalkylene, or haloalkylene group.
[1692] 66. The TREM of any one of embodiments 61-65, wherein M comprises a carbonyl, amide, amine, or ester moiety.
[1693] 67. The TREM of any one of embodiments 1-50, wherein the ASGPR binding moiety comprises a structure of Formula (II-c):

[chemical structure]

[1694] or a salt thereof, wherein:
   [1695] each of R^{2a}, R^{2b}, R³, R⁴, R⁵, and subvariables thereof are as defined for Formula (I);
   [1696] each of L¹, L², and L³ is independently a linker; and
   [1697] M is a branching point, wherein “ [symbol] ” represents an attachment point to a branching point, additional linker, nucleobase, or a sugar of a TREM.
[1698] 68. The TREM of embodiment 67, each of L¹, L², and L³ independently comprises an alkylene, alkenylene, alkynylene, heteroalkylene, or haloalkylene group.
[1699] 69. The TREM of embodiment 67 or 68, wherein each of L¹, L², and L³ independently comprises a carbonyl, amide, amine, or ester moiety.
[1700] 70. The TREM of any one of embodiments 67-69, wherein M comprises an alkylene, alkenylene, alkynylene, heteroalkylene, or haloalkylene group.
[1701] 71. The TREM of any one of embodiments 67-70, wherein M comprises a carbonyl, amide, amine, or ester moiety.
[1702] 72. The TREM of any one of embodiments 1-71, wherein the TREM position bound to the ASGPR binding moiety comprises:

[chemical structure]

[1703] or a pharmaceutically acceptable salt thereof.
[1704] 73. The TREM of any one of embodiments 1-72, wherein the ASGPR binding moiety is bound to a sugar (e.g., a ribose) at any one of TREM positions 1, 2, 3, 4, 5, 6, 7, 8, or 9.
[1705] 74. The TREM of any one of embodiments 1-73, wherein the ASGPR binding moiety is bound to a sugar (e.g., a ribose) at a plurality of TREM positions selected from 1, 2, 3, 4, 5, 6, 7, 8, or 9.
[1706] 75. The TREM of any one of embodiments 1-72, wherein the ASGPR binding moiety is bound to the phosphate backbone at any one of TREM positions 1, 2, 3, 4, 5, 6, 7, 8, or 9.
[1707] 76. The TREM of any one of embodiments 1-75, wherein the ASGPR binding moiety is bound to the phosphate backbone at a plurality of TREM positions selected from 1, 2, 3, 4, 5, 6, 7, 8, or 9.
[1708] 77. The TREM of any one of embodiments 1-76, wherein the ASGPR binding moiety is bound to a sugar (e.g., a ribose) at any one of TREM positions 65, 66, 67, 68, 69, 70, 71, 72, 73, 74, 75, or 76.
[1709] 78. The TREM of any one of embodiments 1-77, wherein the ASGPR binding moiety is bound to a sugar (e.g., a ribose) at a plurality of TREM positions selected from 65, 66, 67, 68, 69, 70, 71, 72, 73, 74, 75, or 76.
[1710] 79. The TREM of any one of embodiments 1-78, wherein the ASGPR binding moiety is bound to the phosphate backbone at any one of TREM positions 65, 66, 67, 68, 69, 70, 71, 72, 73, 74, 75, or 76.
[1711] 80. The TREM of any one of embodiments 1-79, wherein the ASGPR binding moiety is bound to the phosphate backbone at a plurality of TREM positions selected from 65, 66, 67, 68, 69, 70, 71, 72, 73, 74, 75, or 76.
[1712] 81. The TREM of any one of embodiments 1-80, wherein the ASGPR binding moiety is bound to a sugar (e.g., a ribose) at any one of TREM positions 27, 28, 29, 30, 31, 32, 33, 34, 35, 36, 37, 38, 39 40, 41, 42, or 43.
[1713] 82. The TREM of any one of embodiments 1-81, wherein the ASGPR binding moiety is bound to a sugar (e.g., a ribose) at a plurality of TREM positions selected from 27, 28, 29, 30, 31, 32, 33, 34, 35, 36, 37, 38, 39 40, 41, 42, or 43.
[1714] 83. The TREM of any one of embodiments 1-82, wherein the ASGPR binding moiety is bound to the phosphate backbone at any one of TREM positions 27, 28, 29, 30, 31, 32, 33, 34, 35, 36, 37, 38, 39 40, 41, 42, or 43.
[1715] 84. The TREM of any one of embodiments 1-83, wherein the ASGPR binding moiety is bound to the phosphate backbone at a plurality of TREM positions selected from 27, 28, 29, 30, 31, 32, 33, 34, 35, 36, 37, 38, 39 40, 41, 42, or 43.
[1716] 85. The TREM of any one of embodiments 1-84, wherein the ASGPR binding moiety is bound to a sugar moiety (e.g., ribose moiety) at any one of TREM positions 10, 11, 12, 13, 14, 15, 16, 17, 18, 19, 20, 21, 22, 23, 24, 25, or 26.
[1717] 86. The TREM of any one of embodiments 1-85, wherein the ASGPR binding moiety is bound to a sugar moiety (e.g., ribose moiety) at a plurality of TREM positions selected from 10, 11, 12, 13, 14, 15, 16, 17, 18, 19, 20, 21, 22, 23, 24, 25, or 26.
[1718] 87. The TREM of any one of embodiments 1-86, wherein the ASGPR binding moiety is bound to the phosphate backbone at any one of TREM positions 10, 11, 12, 13, 14, 15, 16, 17, 18, 19, 20, 21, 22, 23, 24, 25, or 26.
[1719] 88. The TREM of any one of embodiments 1-87, wherein the TREM retains the ability to support protein synthesis, e.g., relative to a TREM that does not comprise an ASGPR binding moiety or a naturally occurring tRNA.
[1720] 89. The TREM of any one of embodiments 1-88, wherein the TREM retains the ability to be charged by a synthetase, e.g., relative to a TREM that does not comprise an ASGPR binding moiety or a naturally occurring tRNA.
[1721] 90. The TREM of any one of embodiments 1-89, wherein the TREM retains the ability to be bound by an elongation factor, e.g., relative to a TREM that does not comprise an ASGPR binding moiety or a naturally occurring tRNA.
[1722] 91. The TREM of any one of embodiments 1-90, wherein the TREM retains the ability to introduce an amino acid into a peptide chain, e.g., relative to a TREM that does not comprise an ASGPR binding moiety or a naturally occurring tRNA.
[1723] 92. The TREM of any one of embodiments 1-91, wherein the TREM retains the ability to support elongation or support initiation, e.g., relative to a TREM that does not comprise an ASGPR binding moiety or a naturally occurring tRNA.
[1724] 93. The TREM of any one of embodiments 1-92, wherein the TREM has a binding affinity to an ASGPR of between 0.01 nM and 100 mM.

### EXAMPLES

[1725] The following examples are provided to further illustrate some embodiments of the present disclosure, but are not intended to limit the scope of the invention; it will be understood by their exemplary nature that other procedures, methodologies, or techniques known to those skilled in the art may alternatively be used.

Table of Contents for Examples

| | |
|---|---|
| Example 1 | Preparation of Selected ASGPR Binding Moieties |
| Example 2 | Preparation of Selected Nucleotides |
| Example 3 | Synthesis of a TREM |
| Example 4 | Synthesis of TREMs with a terminal amino linker |
| Example 5 | Synthesis of TREMs comprising an ASGPR binding moiety |
| Example 6 | Analysis of GalNAc-TREMs via HPLC |
| Example 7 | Analysis of GalNAc-TREMs via mass spectrometry |
| Example 8 | In vitro delivery of GalNAc-TREMs to cells expressing the ASGPR |
| Example 9 | In vitro delivery of GalNAc-TREMs to primary human hepatocytes |
| Example 10 | Readthrough of a premature termination codon (PTC) in a reporter protein via |
| | administration of TREMs comprising an ASGPR binding moiety through |
| | transfection |
| Example 11 | Readthrough of a premature termination codon (PTC) in a reporter protein via |
| | administration of a TREM comprising an ASGPR binding moiety in cells |
| | expressing the ASGPR |
| Example 12 | Readthrough of a premature termination codon (PTC) in the alpha- |
| | galactosidase (GLA) ORF through administration of a TREM comprising an |
| | ASGPR binding moiety |
| Example 13 | Readthrough of a premature termination codon (PTC) in the alpha- |
| | galactosidase (GLA) ORF to produce a functional GLA protein through |
| | administration of a TREM comprising an ASGPR binding moiety |

### Example 1: Preparation of Selected ASGPR Binding Moieties

[1726] Compound 100: 11-(((2R,3R,4R,5R,6R)-3-acetamido-4,5-diacetoxy-6-(acetoxymethyl)tetrahydro-2H-pyran-2-yl)oxy)-16,16-bis ((3-((3-(5-(((2R,3R,4R,5R,6R)-3-acetamido-4,5-diacetoxy-6-(acetoxymethyl)tetrahydro-2H-pyran-2-yl)oxy) pentanamido)-propyl) amino)-3-oxopropoxy)methyl)-5,11,18-trioxo-14-oxa-6,10,17-triazanonacosan-29-oic acid (Compound 100) may be prepared according to the procedures provided by Nair K. et al. (2014) J. Am. Chem. Soc, 134 (49), 16958-16961.

[chemical structure]

[1727] Compound 101: Trebler GalNAc azide (N—(N-propargyldodecanoylamido)-tris{2-oxa-6,10-diaza-5,11-dioxo-15-[3,4,6-tri-O-acetyl-2-acetamido-2-deoxy-β-D-glucopyranosyloxy] pentadecyl}methane) is commercially available (e.g., from Primetich; catalog #0079).

[chemical structure]

[1728] Compound 200: 11-(((2R,3R,4R,5R,6R)-3-acetamido-4,5-diacetoxy-6-(acetoxymethyl)tetrahydro-2H-pyran-2-yl)oxy)-16,16-bis ((3-((3-(5-(((2R,3R,4R,5R,6R)-3-acetamido-4,5-diacetoxy-6-(acetoxymethyl)tetrahydro-2H-pyran-2-yl)oxy)pentanamido)-propyl)amino)-3-oxopropoxy)methyl)-5,11,18-trioxo-14-oxa-6,10,17-triazanonacosan-29-oic acid (Compound 100) may be prepared according to the procedures provided by Nair K. et al. (2014) J. Am. Chem. Soc, 134 (49), 16958-16961, which is incorporated herein by reference in its entirety.

[chemical structure]

[1729] Compound 201: Trebler GalNAc azide (N-(N-propargyldodecanoylamido)-tris {2-oxa-6,10-diaza-5,11-dioxo-15-[3,4,6-tri-O-acetyl-2-acetamido-2-deoxy-β-D-glucopyranosyloxy]pentadecyl}methane) is commercially available (e.g., from Primetich; catalog #0079).

[chemical structure]

[1730] Compound 202: 1-(((2R,3R,4R,5R,6R)-3-acetamido-4,5-dihydroxy-6-(hydroxymethyl)tetrahydro-2H-pyran-2-yl)oxy)-18,18-bis(17-(((2R,3R,4R,5R,6R)-3-acetamido-4,5-dihydroxy-6-(hydroxymethyl)tetrahydro-2H-pyran-2-yl)oxy)-5-oxo-2,9,12,15-tetraoxa-6-azaheptadecyl)-13,20-dioxo-3,6,9,16-tetraoxa-12,19-diazahentriacontan-31-oic acid

[chemical structure]

[1731] Compound 203: (17S,20S)-1-(((2R,3R,4R,5R,6R)-3-acetamido-4,5-diacetoxy-6-(acetoxymethyl)tetrahydro-2H-pyran-2-yl)oxy)-20-(1-(((2R,3R,4R,5R,6R)-3-acetamido-4,5-diacetoxy-6-(acetoxymethyl)tetrahydro-2H-pyran-2-yl)oxy)-11-oxo-3,6,9-trioxa-12-azahexadecan-16-yl)-17-(2-(2-(2-(2-(((2R,3R,4R,5R,6R)-3-acetamido-4,5-diacetoxy-6-(acetoxymethyl)tetrahydro-2H-pyran-2-yl)oxy) ethoxy) ethoxy) ethoxy) acetamido)-11,18-dioxo-3,6,9-trioxa-12,19-diazahenicosan-21-oic acid was prepared according the procedures outlined in U.S. Pat. No. 9,796,756, which is incorporated herein by reference in its entirety.

[chemical structure]

### Example 2: Preparation of Selected Nucleotides

[1732] Amino Ribose 1: Modified nucleotides comprising an amino handle at the ribose sugar, such as AR1 (2′-O-aminolinker U phosphoramidite (3′-O-[(diisopropylamino) (2-cyanoethoxy) phosphino]-5′-O-(4,4′-dimethoxytrityl)-2′-O-2-[2-(trifluoroacetamido)-ethoxy]ethyluridine)), may be purchased from Berry & Associates; catalog #BA 0281). Briefly, O-aminolinker U phosphoramidite may be purchased with the primary amine protected trifluoroacetate and incorporated into a TREM to afford the amino ribose AR1.

[chemical structure]

[1733] Alkyne Ribose 2: Modified nucleotides comprising an alkyne handle on the ribose, such as AR2 (5′-O-DMT-2′-O-propynyluridine 3′-CE phosphoramidite (5′-O-[Bis (4-methoxyphenyl)-phenylmethyl]-2′-O-2-propyn-1-yl-uridine 3′-[2-cyanoethyl N,N-bis(1-methylethyl)-phosphoramidite]; 5′-O-DMT-2′-O-propargyluridine 3′-CE phosphoramidite)) may be purchased from Biosynth-Carbosynth; catalog #PD139176. 5′-O-DMT-2′-O-propynyluridine 3′-CE phosphoramidite may be incorporated into TREM molecules via standard phosphoramidite chemistry to afford the alkyne ribose AR2.

[chemical structure]

[1734] Alkyne Phosphoramidiate 1: (2R,3S,5R)-2-((bis(4-methoxyphenyl) (phenyl) methoxy)methyl)-5-(5-methyl-2,4-dioxo-3,4-dihydropyrimidin-1 (2H)-yl) tetrahydrofuran-3-yl (3-(2-nitro-5-(prop-2-yn-1-yloxy)phenyl) propyl) Diisopropylphosphoramidite may be prepared and purified according to previously published procedures (Saneyoshi H. et al. (2017) Bioorg. Med. Chem, 25, 3350-3356).

[chemical structure]

[1735] Alkyne Phosphate 1: Modified nucleotides comprising an alkyne handle on a phosphate may be prepared, starting from AP1, using standard phosphoramidite chemistry.

[chemical structure]

[1736] Amino Nucleobase 1: Modified nucleotides comprising an amine handle at the nucleobase, such as AN1 (C6-U phosphoramidite (5′-Dimethoxytrityl-5-[N-(trifluoroacetylaminohexyl)-3-acrylimido]-Uridine, 2′-O-triisopropylsilyloxymethyl-3′-[(2-cyanoethyl)-(N,N-diisopropyl)]-phosphoramidite)), may be purchased from Glen Research; catalog #10-3039. Briefly, Amino-Modifier C6-U phosphoramidite may be purchased with the primary amine protected as trifluoroacetate and incorporated into a TREM to afford the amino nucleobase AN1.

[chemical structure]

[1737] Alkyne Nucleobase 2: Modified nucleotides comprising an alkyne handle at the nucleobase, such as AN2 (C8-alkync-dT-CE phosphoramidite (5′-dimethoxytrityl-5-(octa-1,7-diynyl)-2′-deoxyuridine, 3′-[(2-cyanoethyl)-(N,N-diisopropyl)]-phosphoramidite)) may be purchased from Glen Research; catalog #10-1540. C8-Alkyne-dT-CE Phosphoramidite is incorporated into TREM molecules via standard phosphoramidite chemistry to afford the amino nucleobase AN2.

[chemical structure]

### Example 3: Synthesis of a TREM

[1738] The example describes the synthesis of exemplary TREMs. The TREMs may be chemically synthesized and purified by HPLC according to standard solid phase synthesis methods and phosphoramidite chemistry. (see, e.g., Scaringe S. et al. (2004) Curr Protoc Nucleic Acid Chem, 2.10.1-2.10.16; Usman N. et al. (1987) J. Am. Chem. Soc, 109, 7845-7854). More specifically, an arginine non-cognate TREM molecule named as TREM-Arg-TGA contains the sequence of ARG-UCU-TREM body but with the anticodon sequence corresponding to UCA instead of UCU. Exemplary nucleotide phosphoramidites to be used in the syntheses include 5′-O-dimethoxytrityl-N6-(benzoyl)-2′-O-t-butyldimethylsilyl-adenosine-3′-O-(2-cyanoethyl-N,N-diisopropylamino) phosphoramidite, 5′-O-dimethoxytrityl-N4-(acetyl)-2′-O-t-butyldimethylsilyl-cytidine-3′-O-(2-cyanoethyl-N,N-diisopropylamino) phosphoramidite, 5′-O-dimethoxytrityl-N2-(isobutyryl)-2′-O-t-butyldimethylsilyl-guanosine-3′-O-(2-cyanoethyl-N,N-diisopropylamino) phosphoramidite, and 5′-O-dimethoxytrityl-2′-O-t-butyldimethylsilyl-uridine-3′-O-(2-cyanoethyl-N,N-diisopropylamino) phosphoramidite.

[1739] A large number of TREMs may be synthesized in this manner, including, inter alia, (1) an arginine non-cognate TREM (e.g., TREM-Arg-TGA) that contains the sequence of ARG-UCU-TREM but with the anticodon sequence corresponding to UCA instead of UCU (i.e., SEQ ID NO: 622); (2) a serine non-cognate TREM named TREM-Ser-TAG that contains the sequence of SER-GCU-TREM but with the anticodon sequence corresponding to CUA instead of GCU (i.e., SEQ ID NO: 653); and (3) a glutamine non-cognate TREM named TREM-Gln-TAA that contains the sequence of GLN-CUG-TREM but with the anticodon sequence corresponding to UUA instead of CUG (i.e., SEQ ID NO: 650).

### Example 4: Synthesis of TREMs with a Terminal Amino Linker

[1740] This example describes the synthesis of TREM molecules with an amino linker at the 5′ terminus. The amino linker is added to the 5′ end of the oligonucleotides via phosphoramidite chemistry on a synthesizer. For example, TFA-amino C6 CED phosphoramidite may be incorporated at the 5′ end of oligonucleotide. Similar chemistry may be employed to couple the amino linker to the 3′ terminus.

[chemical structure]

[1741] Additionally, the amino linker may be incorporated into the TREM sequence by using a phosphoramidite comprising an aminohexyl linker. In these cases, a compound such as 6-(4-monomethoxytritylamino) hexyl-(2-cyanoethyl)-(N,N-diisopropyl) phosphoramidite may be used, which is commercially available from ChemGenes; catalog #CLP-1563.

### Example 5: Synthesis of TREMs Comprising an ASGPR Binding Moiety

[1742] The example describes the synthesis of an exemplary TREM comprising an ASGPR binding moiety. Several methods of coupling the ASGPR binding moieties to the TREM may be used, including employing amide formation and triazole-based click chemistry may be used. For example, a carboxylic acid triantennary GalNAc molecule may be coupled with oligonucleotides bearing amino linkers via an amide bond formation reaction. Briefly, a solution of Compound 100 (2 equivalents), HATU (1.8 equivalents) and diisopropylethylamine (8 equivalents) in dry acetonitrile (or dry DMF) is vortexed for 2 minutes. To this solution is added an aqueous solution of a TREM bearing an amino linker (1 equivalent), such as the TREM bearing an amino linker outlined in Example 4. The reaction mixture is vortexed for 2 minutes and kept at room temperature for 60 minutes, at which point the solvent is removed under vacuum, diluted with water and purified by reversed phase column chromatography or ion exchange chromatography. In cases where GalNAc moieties are protected, the protecting groups may then be removed by appropriate treatment. For example, when the free hydroxyl groups in the GalNAc moieties are protected with acetyl groups, ammonium hydroxide treatment is performed for 6 h at room temperature, followed by purification to afford the final GalNAc-TREM conjugate (106).

[chemical structure]

[1743] Alternatively, TREM molecules bearing an alkyne group can be conjugated to ASGPR binding moieties bearing an azide group, such as Trebler GalNAc azide. The reaction may be carried out via copper catalyzed azide-alkyne cycloaddition (Saneyoshi H. et al. (2017) Bioorg. Med. Chem, 25, 3350-3356), and purified using standard techniques to yield triazolyl-containing moieties such as Compound 107 below.

[chemical structure]

[1744] For example, a carboxylic acid triantennary GalNAc molecule may be coupled with oligonucleotides bearing amino linkers via an amide bond formation reaction. Briefly, a solution of Compound 200 (2 equivalents), HATU (1.8 equivalents) and diisopropylethylamine (8 equivalents) in dry acetonitrile (or dry DMF) can be vortexed for 2 minutes. To this solution an aqueous solution of a TREM bearing an amino linker (1 equivalent) can be added, such as the TREM bearing an amino linker outlined in Example 4. The reaction mixture will be vortexed for 2 minutes and kept at room temperature for 60 minutes, at which point the solvent can be removed under vacuum, diluted with water, and purified by reversed phase column chromatography or ion exchange chromatography. In cases where GalNAc moieties contain protecting groups, these protecting groups can be removed by appropriate treatment. For example, when the free hydroxyl groups in the GalNAc moieties are protected with acetyl groups, ammonium hydroxide treatment are performed for 6 h at room temperature, followed by purification to afford the final GalNAc-TREM conjugate (206).

[chemical structure]

[1745] ASGPR binding moieties bearing a free carboxylate may be also first activated to pentafluorophenyl esters (PFPs), followed by coupling a free amine on the TREM, either at the 3′ or 5′ terminus or internally on a nucleobase amine (for example, a linker on a nucleobase).

[1746] Additionally, TREMs were coupled to various ASGPR binding moieties by converting certain ASGPR binding moieties bearing free carboxylates, such as Compounds 200, 202, and 203, to N-hydroxysuccinimide (NHS)-activated compounds. Briefly, the carboxylate-bearing ASGPR binding moieties were dissolved in dimethylformamide (DMF) and N-hydroxysuccinimide (NHS, 1.1 equiv) and N,N-diisopropylcarbodiimide (1.1 equiv) were added. The solution was stirred at room temperature for 18 hours and coupled directly to a TREM without further purification. A TREM bearing a free amine group, such as a TREM with a terminal amino linker or a TREM bearing a modified nucleotide (e.g., AN1 or AN2), was dissolved in mixture of 50 mM sodium carbonate/bicarbonate buffer pH 9.6 and dimethylsulfoxide (DMSO) 4:6 v/v. To this solution was added 1.2 molar equivalents of the NHS ester-activated ASGPR binding moiety solution in DMF. The reaction was carried out at room temperature for 1 hour, after which another 1.2 molar equivalent of the NHS ester-activated ASGPR binding moiety in DMF was added. After 1 hour, the reaction was diluted 15-fold with water, filtered through a 1.2 μm filter, and purified by reversed-phase HPLC (Xbridge C18 Prep 19×50 mm, using a 100 mM triethylamine acetate pH 7/95% acetonitrile buffer system). Any protecting groups on the ASGPR binding moieties were then removed, for example, by treatment with 3M sodium acetate pH 5.2 and 80% ethanol.

[1747] Alternatively, TREM molecules bearing an alkyne group were conjugated to ASGPR binding moieties bearing an azide group, such as Trebler GalNAc azide (Compound 201). The reaction was carried out via copper catalyzed azide-alkyne cycloaddition (Saneyoshi H. et al. (2017) Bioorg. Med. Chem, 25, 3350-3356; incorporated herein by reference in its entirety), and purified using standard techniques to yield triazolyl-containing moieties such as Compound 207 below.

[chemical structure]

[1748] Table 12 summarizes a list of TREMs prepared containing an ASGPR binding moiety, according to the protocols provided herein. Each TREM in the sequence is either unconjugated (e.g., a control) or conjugated to either i) a ASGPR binding moiety described herein (abbreviated as “GalNAc” in the table); ii) a fluorophore such as Cy3; and/or iii) a linker (abbreviated as “5-LC-N” in the table. The molecular weight of each TREM was confirmed by LC-MS, wherein the determined molecular weight was found to be within +/−0.04% of the calculated molecular weight for each TREM.

TABLE 12
Exemplary TREMs comprising an ASGPR binding moiety

| Compound | SEQ | | | Calculated |
|---|---|---|---|---|
| No. | ID NO. | Descriptor | Sequence | MW |
| 99 | 622 | Arg-TGA | GGCUCCGUGGCGCAAUGGAUAG | |
| | | (Unconjugated) | CGCAUUGGACUUCAAAUUCAAA | |
| | | | GGUUCCGGGUUCGAGUCCCGGC | |
| | | | GGAGUCGCCA | |
| 100 | 623 | Arg-TGA (1-G- | [GalNAc]-[TE]- | 26,355.7 |
| | | GalNAc- | GGGCUCCGUGGCGCAAUGGAUA | |
| | | linkage on | GCGCAUUGGACUUCAAAUUCAA | |
| | | 5′terminus) | AGGUUCCGGGUUCGAGUCCCGG | |
| | | | CGGAGUCGCCA | |
| 101 | 624 | Arg-TGA (16-U- | GGCUCCGUGGCGCAAU[GalNAc] | 26,343.8 |
| | | GalNAc) | GGAUAGCGCAUUGGACUUCAAA | |
| | | | UUCAAAGGUUCCGGGUUCGAGU | |
| | | | CCCGGCGGAGUCGCCA | |
| 102 | 625 | Arg-TGA (20-U- | GGCUCCGUGGCGCAAUGGAU | 26,343.8 |
| | | GalNAc) | [GalNAc]AGCGCAUUGGACUUCA | |
| | | | AAUUCAAAGGUUCCGGGUUCGA | |
| | | | GUCCCGGCGGAGUCGCCA | |
| 103 | 626 | Arg-TGA (47-U- | GGCUCCGUGGCGCAAUGGAUAG | 26,343.8 |
| | | GalNAc) | CGCAUUGGACUUCAAAUUCAAA | |
| | | | GGU[GalNAc]UCCGGGUUCGAG | |
| | | | UCCCGGCGGAGUCGCCA | |
| 104 | 627 | Arg-TGA (16-U- | [Cy3]GGCUCCGUGGCGCAAU | 26,851.0 |
| | | GalNAc) & 5′- | [GalNAc]GGAUAGCGCAUUGGA | |
| | | Cy3 | CUUCAAAUUCAAAGGUUCCGGGU | |
| | | | UCGAGUCCCGGCGGAGUCGCCA | |
| 105 | 628 | Arg-TGA (20-U- | [Cy3]GGCUCCGUGGCGCAAUGGA | 26,851.0 |
| | | GalNAc) & 5′- | U[GalNAc]AGCGCAUUGGACUUCA | |
| | | Cy3 | AAUUCAAAGGUUCCGGGUUCGA | |
| | | | GUCCCGGCGGAGUCGCCA | |
| 106 | 629 | Arg-TGA (47-U- | [Cy3]GGCUCCGUGGCGCAAUGGA | 26,851.0 |
| | | GalNAc) & 5′- | UAGCGCAUUGGACUUCAAAUUC | |
| | | Cy3 | AAAGGU[GalNAc]UCCGGGUUCGA | |
| | | | GUCCCGGCGGAGUCGCCA | |
| 107 | 630 | Arg-TGA (16- | GGCUCCGUGGCGCAAU[5-LC-N] | 24,676.9 |
| | | linker) | GGAUAGCGCAUUGGACUUCAAA | |
| | | | UUCAAAGGUUCCGGGUUCGAGU | |
| | | | CCCGGCGGAGUCGCCA | |
| 108 | 631 | Arg-TGA (20- | GGCUCCGUGGCGCAAUGGAU[5- | 24,676.9 |
| | | linker) | LC-N]AGCGCAUUGGACUUCAAA | |
| | | | UUCAAAGGUUCCGGGUUCGAGU | |
| | | | CCCGGCGGAGUCGCCA | |
| 109 | 632 | Arg-TGA (47- | GGCUCCGUGGCGCAAUGGAUAG | 24,676.9 |
| | | linker) | CGCAUUGGACUUCAAAUUCAAA | |
| | | | GGU[5-LC-N] | |
| | | | UCCGGGUUCGAGUCCC | |
| | | | GGCGGAGUCGCCA | |
| 110 | 633 | Gln-TAA (16- | GGUUCCAUGGUGUAAU[GalNAc]G | 25,890.5 |
| | | U-GalNAc) | GUAAGCACUCUGGACUUUAAAU | |
| | | | CCAGCGAUCCGAGUUCGAGUCUC | |
| | | | GGUGGAACCUCCA | |
| 111 | 634 | Gln-TAA (19- | GGUUCCAUGGUGUAAUGGU | 25,890.5 |
| | | U-GalNAc) | [GalNAc]AAGCACUCUGGACUU | |
| | | | UAAAUCCAGCGAUCCGAGUUCGA | |
| | | | GUCUCGGUGGAACCUCCA | |
| 112 | 635 | Gln-TAA (16- | [Cy3]GGUUCCAUGGUGUAAU | 26,397.7 |
| | | U-GalNAc) & | [GalNAc]GGUAAGCACUCUGGA | |
| | | 5′-Cy3 | CUUUAAAUCCAGCGAUCCGAGUU | |
| | | | CGAGUCUCGGUGGAACCUCCA | |
| 113 | 636 | Gln-TAA (19- | [Cy3]GGUUCCAUGGUGUAAUGGU | 26,397.7 |
| | | U-GalNAc) & | [GalNAc]AAGCACUCUGGACUUUA | |
| | | 5′-Cy3 | AAUCCAGCGAUCCGAGUUCGAG | |
| | | | UCUCGGUGGAACCUCCA | |
| 114 | 637 | Gln-TAA (47- | [Cy3]GGUUCCAUGGUGUAAUGGU | 26,397.7 |
| | | U-GalNAc) & | AAGCACUCUGGACUUUAAAUCC | |
| | | 5′-Cy3 | AGCGAU[GalNAc]CCGAGUUCGAG | |
| | | | UCUCGGUGGAACCUCCA | |
| 115 | 638 | Gln-TAA (16- | GGUUCCAUGGUGUAAU[5-LC- | 24,223.6 |
| | | linker) | N]GGUAAGCACUCUGGACUUUAA | |
| | | | AUCCAGCGAUCCGAGUUCGAGU | |
| | | | CUCGGUGGAACCUCCA | |
| 116 | 639 | Gln-TAA (19- | GGUUCCAUGGUGUAAUGGU[5-LC- | 24,223.6 |
| | | linker) | N]AAGCACUCUGGACUUUAAAUC | |
| | | | CAGCGAUCCGAGUUCGAGUCUC | |
| | | | GGUGGAACCUCCA | |
| 117 | 640 | Gln-TAA (47- | GGUUCCAUGGUGUAAUGGUAAG | 24,223.6 |
| | | linker) | CACUCUGGACUUUAAAUCCAGC | |
| | | | GA U[5-LC-N]CCGAGUUCGAGU | |
| | | | CUCGGUGGAACCUCCA | |
| 118 | 641 | Ser-TAG (1-G- | [GalNAc]-[TE]- | 29,170.4 |
| | | GalNAc- | GACGAGGUGGCCGAGUGGUUAA | |
| | | linkage on | GGCGAUGGACUCUAAAUCCAUU | |
| | | 5′terminus) | GUGCUCUGCACGCGUGGGUUCG | |
| | | | AAUCCCAUCCUCGUCGCCA | |
| 119 | 642 | Ser-TAG (16- | GACGAGGUGGCCGAGU[GalNAc]G | 29,158.4 |
| | | U-GalNAc) | GUUAAGGCGAUGGACUCUAAAU | |
| | | | CCAUUGUGCUCUGCACGCGUGG | |
| | | | GUUCGAAUCCCAUCCUCGUCGCC | |
| | | | A | |
| 120 | 643 | Ser-TAG (20- | GACGAGGUGGCCGAGUGGUU | 29,158.4 |
| | | U-GalNAc) | [GalNAc]AAGGCGAUGGACUCU | |
| | | | AAAUCCAUUGUGCUCUGCACGCG | |
| | | | UGGGUUCGAAUCCCAUCCUCGUC | |
| | | | GCCA | |
| 121 | 644 | Ser-TAG (46- | GACGAGGUGGCCGAGUGGUUAA | 29,158.4 |
| | | U-GalNAc) | GGCGAUGGACUCUAAAUCCAUU | |
| | | | GU[GalNAc]GCUCUGCACGCGUGG | |
| | | | GUUCGAAUCCCAUCCUCGUCGCC | |
| | | | A | |
| 122 | 645 | Ser-TAG (20- | [Cy3]GACGAGGUGGCCGAGUGGU | 29,665.7 |
| | | U-GalNAc) & | U[GalNAc]AAGGCGAUGGACUCUA | |
| | | 5′-Cy3 | AAUCCAUUGUGCUCUGCACGCG | |
| | | | UGGGUUCGAAUCCCAUCCUCGUC | |
| | | | GCCA | |
| 123 | 646 | Ser-TAG (46- | [Cy3]GACGAGGUGGCCGAGUGGU | 29,665.7 |
| | | U-GalNAc) & | UAAGGCGAUGGACUCUAAAUCC | |
| | | 5′-Cy3 | AUUGU[GalNAc]GCUCUGCACGCG | |
| | | | UGGGUUCGAAUCCCAUCCUCGUC | |
| | | | GCCA | |
| 124 | 647 | Ser-TAG (16- | GACGAGGUGGCCGAGU[5-LC- | 27,491.6 |
| | | linker) | N]GGUUAAGGCGAUGGACUCUAA | |
| | | | AUCCAUUGUGCUCUGCACGCGU | |
| | | | GGGUUCGAAUCCCAUCCUCGUCG | |
| | | | CCA | |
| 125 | 648 | Ser-TAG (20- | GACGAGGUGGCCGAGUGGUU[5- | 27,491.6 |
| | | linker) | LC-N]AAGGCGAUGGACUCUAA | |
| | | | AUCCAUUGUGCUCUGCACGCGU | |
| | | | GGGUUCGAAUCCCAUCCUCGUCG | |
| | | | CCA | |
| 126 | 649 | Ser-TAG (46- | GACGAGGUGGCCGAGUGGUUAA | 27,491.6 |
| | | linker) | GGCGAUGGACUCUAAAUCCAUU | |
| | | | GU[5-LC-N] | |
| | | | GCUCUGCACGCGUGGGU | |
| | | | UCGAAUCCCAUCCUCGUCGCCA | |
| 127 | 650 | Gln-TAA | GGUUCCAUGGUGUAAUGGUAAG | |
| | | (Unconjugated) | CACUCUGGACUUUAAAUCCAGC | |
| | | | GAUCCGAGUUCGAGUCUCGGUG | |
| | | | GAACCUCCA | |
| 128 | 651 | Gln-TAA-1-G- | [GalNAc]-[TE]- | |
| | | GalNAc | GGUUCCAUGGUGUAAUGGUAAG | |
| | | | CACUCUGGACUUUAAAUCCAGC | |
| | | | GAUCCGAGUUCGAGUCUCGGUG | |
| | | | GAACCUCCA | |
| 129 | 652 | Gln-TAA-47- | GGUUCCAUGGUGUAAUGGUAAG | |
| | | U-GalNAc | CACUCUGGACUUUAAAUCCAGC | |
| | | | GAU[GalNAc]CCGAGUUCGAGUCU | |
| | | | CGGUGGAACCUCCA | |
| 130 | 653 | Ser-TAG | GACGAGGUGGCCGAGUGGUUAA | |
| | | (Unconjugated) | GGCGAUGGACUCUAAAUCCAUU | |
| | | | GUGCUCUGCACGCGUGGGUUCG | |
| | | | AAUCCCAUCCUCGUCGCCA | |
| 131 | 654 | Ser-TAG (16- | [Cy3]GACGAGGUGGCCGAGU | |
| | | U-GalNAc) & | [GalNAc]GGUUAAGGCGAUGGA | |
| | | 5′-Cy3 | CUCUAAAUCCAUUGUGCUCUGCA | |
| | | | CGCGUGGGUUCGAAUCCCAUCCU | |
| | | | CGUCGCCA | |

### Example 6: Analysis of GalNAc-TREMs Via HPLC

[1749] The example describes the analysis of GalNAc-TREM molecules via HPLC. GalNAc-TREM molecules may be analyzed by HPLC, for example, to evaluate the purity and homogeneity of the compositions. A Waters Aquity UPLC system using a Waters BEH C18 column (2.1 mm×50 mm×1.7 μm) may be used for this analysis. Samples may be prepared by dissolving 0.5 nmol of the oligonucleotide in 75 μL of water and injecting 2 μL of the solution. The buffers used may be 50 mM dimethylhexylammonium acetate with 10% CH₃CN (acetonitrile) as buffer A and 50 mM dimethylhexylammonium acetate with 75% CH₃CN as buffer B (gradient 25-75% buffer B over 5 mins), with a flow rate of 0.5 mL/min at 60° C.

### Example 7: Analysis of GalNAc-TREMs Via Mass Spectrometry

[1750] The example describes the mass spectrometry analysis of the GalNAc-TREM molecules. ESI-LCMS data for the oligonucleotides may be acquired on a Thermo Ultimate 3000-LTQ-XL mass spectrometer. Samples may be prepared by dissolving 0.5 nmol of the oligonucleotide in 75 μL of water and injecting 10 μL of the solution directly onto a Novatia C18 (HTCS-HTC1-4) trap column. Following injection into the trap column, the sample may be eluted directly onto the LTQ-MS with 85% CH₃CN, 50 mM HFIP (hexafluoro-2-propanol), 10 μM EDTA (ethylenediaminetetraacetic acid), 0.35% DIPEA (N,N-diisopropylethylamine) and the mass to charge ratio (m/z) is determined.

### Example 8. In Vitro Delivery of GalNAc-TREMs to Cells Expressing the ASGPR

[1751] This example describes the in vitro delivery of exemplary GalNAc-conjugated TREMs into U2OS cells expressing the ASGPR under gymnotic conditions (without a transfection agent). The methods described in this example can be adopted for evaluating the levels of GalNAc-TREMs in ASGR-expressing cells after delivery.

### Host Cell Modification

[1752] A U2OS cell line engineered to stably express the ASGP receptor (ASGPR) can be generated using plasmid transfection and selection. Briefly, the cells will be co-transfected with a plasmid encoding the ASGPRI gene and a puromycin selection cassette. The next day, cells are selected with puromycin. The remaining cells are expanded and tested for ASGPR expression.

### Delivery of GalNAc-TREMs Under Gymnotic Conditions

[1753] The ASGPR engineered U2OS cells will be harvested and diluted to 4×10⁴ cells/mL in complete growth medium, and 100 uL of the diluted cell suspension will be added in a 96-well plate (3904, Corning, USA). The plate will be placed in a 37° C. 5% CO₂ incubator for cell attachment to the well bottom. After 20-24 hours, various GalNAc-TREMs modified with a fluorophore at the 5′ terminus (Cy3) will be diluted to a 10-fold concentration (e.g. 1000 nM) into the RNase-free water and added to the well at a 1:10 dilution. The plate will be placed in the 37° C. 5% CO2 incubator for 20-24h before the tRNA quantification assay to determine the intracellular levels of the GalNAc-TREM.

Quantitative tRNA Delivery Using Live Imaging

[1754] At 20-24h post tRNA delivery, the plate will be taken out of the incubator. After aspiration, the culture medium (Hoechest 33342; Thermofisher, USA) will be diluted to 1:10,000 in the full growth medium and added to the cells. The plate will be incubated at room temperature (˜25° C.) for 10 min, then washed with 1×DPBS for 6 times. After the last wash, full growth medium (100 uL per/well) will be added to the plate. The plate will be imaged under ImageXpress Pico Micrscope (Molecular Device, USA) with three channels (Cy3/DAPI/Brightfield) at 20× magnification. The average intensity of Cy3 channel will be quantified by the “Cell scoring” function from the microscope software. Free uptake by the ASGPR1-expressing U2OS cells of Gln-TAA conjugated with GalNAc along the TREM will be detected by visualizing the Cy3 tag with fluorescent microscopy. The negative control cells will be exposed to unconjugated Gln-TAA TREMs while the positive control will be exposed to GalNAc-modified Gln-TAA TREMs with RNAiMAX transfection reagent. Quantification of the average intensity of the microscopy results will be calculated, comparing free uptake of the TREM and transfection-facilitated uptake of the TREM. Other modified TREMs (e.g., Arg-TGA or Ser-TAG) will also be tested.

### Example 9. In Vitro Delivery of GalNAc-TREMs to Primary Human Hepatocytes

[1755] This example describes the in vitro delivery of a GalNAc-conjugated TREM into primary human hepatocytes under gymnotic conditions (without a transfection agent). The methods described in this example can be adopted for evaluating the levels of GalNAc-TREMs in the hepatocytes after delivery.

[1756] One cryo-vial of Liverpool, 10 donor human cryoplateable hepatocytes (X008001-P, BioIVT, USA), is carefully thawed and diluted in pre-warmed INVITROGRO CP Medium at 37° C. The total cell count and the number of viable cells are determined using a cell counter. A >70% viability is expected with a successful thawing procedure. The cells are further diluted to 7×105 viable cells/mL, and 70 uL of the diluted cell suspension is seeded in a collagen-coated 96-well plate (354649, Corning, USA). The plate is shaken gently in a back-and-forth and side-to-side manner to evenly distribute the cells. The plate is placed in a 37° C. 5% CO₂ incubator. After 2 hours, the plate is carefully washed with INVITROGRO CP Medium. GalNAc-TREMs are diluted to a working concentration (e.g. 100 nM) into the growth medium and added to the well. The plate is placed in the 37° C. 5% CO₂ incubator for 20-24 h before the tRNA quantification assay to determine the intracellular levels of the GalNAc-TREM.

Quantitative tRNA Profiling

[1757] The intracellular levels of GalNAc-TREM may be determined using next generation sequencing, as previously described in Pinkard et al., Nat Comm (2020) 11, 4104. Briefly, the hepatocytes treated under gymnotic conditions with GalNAc-TREM as described above may be lysed and total RNA purified using a method such as phenol chloroform extraction. RNAs smaller than 200 nucleotides are separated from the lysate using a small RNA isolation kit per manufacturer's instructions to generate a small RNA (sRNA) fraction.

[1758] The sRNA fraction is deacylated using 100 mM Tris-HCl (pH 9.0) at 37° C. for 45 minutes. The solution is neutralized by the addition of an equal volume of 100 mM Na-acetate/acetic acid (pH 4.8) and 100 mM NaCl, followed by ethanol precipitation. Deacylated sRNA is splint ligated in a reaction with 3′ adapter, a mix of 4 splint strands and annealing buffer at 37° C. for 15 minutes followed by addition of a RNL2 ligase reaction buffer mix at 37° C. for 1 h and then at 4° C. for 1 hr. The deacylated and splint ligated sRNA is precipitated using a method such as phenol chloroform extraction.

[1759] The deacylated and splint ligated sRNA is then reverse transcribed using an RT enzyme such as Superscript IV at 55° C. for 1 hr. The reaction product is desalted in a micro Bio-Spin P30 (BioRad cat #7326250) according to manufacturer directions, and the sample is run on a denaturing polyacrylamide gel. Gel bands from 65-200 nt are excised, and sRNA is extracted. The sRNA is circularized using a circligase and purified. The purified circularized RNA is PCR amplified and product run on a e-gel ex. Bands from 100-250 nt are excised and purified using a commercial kit (e.g., Qiaquick gel extraction kit) according to manufacturer directions, and RNA is precipitated. Next generation sequencing may then be performed on the libraries and the sequences mapped to a genomic database, in this example to the genomic tRNA database, GtRNAdb.

Quantitative tRNA Delivery Using Cy3 Live Imaging

[1760] At 20-24h post tRNA delivery, the plate will be taken out of the incubator. After aspirating the culture medium, Hoechest 33342 (62249, Thermofisher, USA) will be diluted to 1:10,000 in the INVITROGRO CP Medium and added to the cells. The plate will be incubated at room temperature (˜25° C.) for 10 min, then washed with 1×DPBS for 6 times. After the last wash, INVITROGRO CP medium (100 uL per/well) will be added to the plate. The plate will be imaged using ImageXpress Pico Microscope (Molecular Device, USA) with three channels (Cy3/DAPI/Brightfield) at 20× magnification. The average intensity of Cy3 channel will be quantified by the “Cell scoring” function from the microscope software. Free uptake of TREMs and transfection of TREMs using a reagent will be compared.

### Example 10. Readthrough of a Premature Termination Codon (PTC) in a Reporter Protein Via Administration of TREMs Comprising an ASGPR Binding Moiety Through Transfection

[1761] This example describes an assay to test the ability of non-cognate TREMs bearing an ASGPR binding moiety (“GalNAc-TREMs”) to readthrough a PTC in a cell expressing a protein having a PTC. This Example describes an arginine non-cognate TREM, though a non-cognate TREM specifying any one of the other 19 amino acids can also be used. Host cell modification

[1762] A cell line engineered to stably express the NanoLuc reporter construct containing a premature termination codon (PTC) may be generated using the FlpIn system according to the manufacturer's instructions.

### Synthesis and Preparation of Non-Cognate GalNAc-TREM

[1763] In this example, the arginine non-cognate GalNAc-TREM, may be produced such that it contains the sequence of the ARG-UCU-TREM body but with the anticodon sequence corresponding to UCA instead of UCU, and is conjugated to the GalNAc moiety. The arginine non-cognate GalNAc-TREM is synthesized as described previously, and its quality controlled using methods as described in Examples 6-7. To ensure proper folding, the TREM may be heated at 85° C. for 2 minutes and then snap cooled at 4° C. for 5 minutes.

Delivery of Non-Cognate GalNAc-TREM into Host Cells Through Transfection

[1764] To deliver the GalNAc-TREM into the NanoLuc reporter cells, a reverse transfection reaction is performed on the NanoLuc reporter cells using lipofectamine RNAiMAX (ThermoFisher Scientific, USA) according to manufacturer instructions. Briefly, 5 uL of a 2.5 uM solution of GalNAc-TREMs are diluted in a 20 uL RNAiMAX/OptiMEM mixture. After 30 min gentle mixing at room temperature, the 25 uL GalNAc-TREM/transfection mixture is added to a 96-well plate and kept still for 20-30 min before adding the cells. The NanoLuc reporter cells are harvested and diluted to 4×10⁵ cells/mL in complete growth medium, and 100 L of the diluted cell suspension is added and mixed to the plate containing the GalNAc-TREM. After 24 h, 100 uL complete growth medium is added to the 96-well plate for cell health.

### Translation Suppression Assay

[1765] To monitor the efficacy of the GalNAc-TREM to readthrough the PTC in the reporter construct 48 hours after GalNAc-TREM delivery into cells, a NanoGlo bioluminescent assay (Promega, USA) may be performed according to manufacturer instruction. Briefly, cell media is replaced and allowed to equilibrate to room temperature. NanoGlo reagent is prepared by mixing the buffer with substrate in a 50:1 ratio. 50 uL of mixed NanoGlo reagent is added to the 96-well plate and mixed on the shaker at 600 rpm for 10 min. After 2 min, the plate is centrifuged at 1000 g, followed by a 5 min incubation step at room temperature before measuring sample bioluminescence. As a positive control, a host cell expressing the NanoLuc reporter construct without a PTC is used. As a negative control, a host cell expressing the NanoLuc reporter construct with a PTC is used, but no GalNAc-TREM is transfected. The efficacy of the GalNAc-TREMs is measured as a ratio of the NanoLuc luminescence in the experimental sample to the NanoLuc luminescence of the positive control or as a ratio of the NanoLuc luminescence in the experimental sample to the NanoLuc luminescence of the negative control. It is expected that if the arginine non-cognate TREM is functional, it may be able to read-through the stop mutation in the NanoLuc reporter and produce a luminescent reading higher than the luminescent reading measured in the negative control. If the arginine non-cognate TREM is not functional, the stop mutation is not rescued, and luminescence less or equal to the negative control is detected.

[1766] The impacts of including ASGPR binding moieties in the TREM sequence will be evaluated. The data for each modified TREM will be provided as log 2 fold changes compared with the mock sample, wherein “1” indicates less than a 4.00 log 2 fold change; “2” indicates a log 2 fold change greater than or equal to 4.01 and less than 7.00 log 2 fold change; and “3” indicates greater than or equal to 7.01 log 2 fold change. The results will show if the ASGPR binding moieties and other modifications can be tolerated at many positions, and if particular sites are sensitive to modification or exhibit improved activity when modified.

### Example 11: Readthrough of a Premature Termination Codon (PTC) in a Reporter Protein Via Administration of a TREM Comprising an ASGPR Binding Moiety in Cells Expressing the ASGPR

[1767] This example describes an assay to test the ability of a non-cognate GalNAc-TREM to readthrough a PTC in a cell line expressing a reporter protein having a PTC. This Example describes an arginine non-cognate TREM though a non-cognate TREM specifying any one of the other 19 amino acids can be used.

### Host Cell Modification

[1768] A cell line engineered to stably express the ASGPR and a NanoLuc reporter construct containing a premature termination codon (PTC) may be generated using the FlpIn system according to manufacturer's instructions. Briefly, HEK293T (293T ATCC® CRL-3216) cells are co-transfected with an expression vector containing a Nanoluc reporter with a PTC, such as pcDNA5/FRT-NanoLuc-TAA and a pOG44 Flp-Recombinase expression vector using Lipofectamine2000 according to manufacturer's instructions. After 24 hours, the media is replaced with fresh media. The next day, the cells are split 1:2 and selected with 100 ug/mL hygromycin for 5 days. The remaining cells are expanded and tested for reporter construct expression. Following that expansion step, the cells are co-transfected with a plasmid encoding the ASGRI gene and selection cassette, such as a puromycin cassette. The next day, cells are selected with puromycin. The remaining cells are expanded and tested for ASGPR expression.

### Synthesis and Preparation of Non-Cognate GalNAc-TREM

[1769] In this example, the arginine non-cognate GalNAc-TREM, is produced such that it contains the sequence of the ARG-UCU-TREM body but with the anticodon sequence corresponding to UCA instead of UCU and is conjugated to the GalNAc moiety. The arginine non-cognate GalNAc-TREM may be synthesized as described previously and its quality controlled using methods as described herein. To ensure proper folding, the TREM is heated at 85° C. for 2 minutes and then snap cooled at 4° C. for 5 minutes.

Delivery of Non-Cognate GalNAc-TREM into Host Cells

[1770] 100 nM of the arginine non-cognate GalNAc-TREM may be delivered to mammalian cells gymnotically or using transfection reagents, as described herein.

### Translation Suppression Assay

[1771] To monitor the efficacy of the arginine non-cognate GalNAc-TREM to readthrough the PTC in the reporter construct, the cells are evaluated roughly 24-48 hours after TREM delivery. The cell media is replaced and the cells are allowed to equilibrate to room temperature. An equal volume to the cell media of ONE-Glo™ EX Reagent is added to the well and mixed on the orbital shaker at 500 rpm for 3 min followed by addition of an equal volume of cell media of NanoDLR™ Stop & Glo, followed by and mixing on the orbital shaker at 500 rpm for 3 min. The reaction is incubated at room temperature for 10 min and NanoLuc activity is detected by reading the luminescence in a plate reader. As a positive control, a host cell expressing the NanoLuc reporter construct without a PTC is used. As a negative control, a host cell expressing the NanoLuc reporter construct with a PTC is used but no GalNAc-TREM is transfected. The efficacy of the GalNAc-TREM may be measured as a ratio of the NanoLuc luminescence in the experimental sample to the NanoLuc luminescence of the positive control. It is expected that if the arginine non-cognate TREM is functional, read-through the stop mutation in the NanoLuc reporter may occur and produce a luminescent reading higher than the luminescent reading measured in the negative control. If the arginine non-cognate TREM is not functional, the stop mutation may not be not rescued, and luminescence less or equal to the negative control is detected.

### Example 12. Readthrough of a Premature Termination Codon (PTC) in the Alpha-Galactosidase (GLA) ORF Through Administration of a TREM Comprising an ASGPR Binding Moiety

[1772] This example describes an assay to test the ability of a non-cognate GalNAc-TREM to readthrough a PTC, such as R220X, in the alpha-galactosidase (GLA) open reading frame (ORF) in hepatocytes differentiated from reprogrammed Fabry disease patient-derived cell line. This Example describes an arginine non-cognate GalNAc-TREM, though a non-cognate TREM specifying any one of the other 19 amino acids can be used.

### Patient-Derived Cells

[1773] Fibroblast cells derived from a patient with Fabry disease having a PTC in the alpha-galactosidase (GLA) open reading frame (ORF), such as R220X, may be obtained from a center or an organization, such as the Coriell Institute (catalog #s GM00881 and GM02769). The patient-derived fibroblast cells are reprogrammed into iPSCs and differentiated into hepatocytes as previously shown (Takahashi, K. & Yamanaka, S. (2006) Cell 126, 663-676 (2006); Park I. et al. (2008) Nature 451, 141-146); Jia, B. et al. (2014) Life Sci. 108, 22-29).

### Synthesis and Preparation of Non-Cognate GalNAc-TREM

[1774] In this example, the arginine non-cognate GalNAc-TREM is produced such that it contains the sequence of the ARG-UCU-TREM body but with the anticodon sequence corresponding to UCA instead of UCU and is conjugated to the GalNAc moiety. The arginine non-cognate GalNAc-TREM is synthesized as described previously and its quality controlled using methods as described in Examples 10-11. To ensure proper folding, the TREM is heated at 85° C. for 2 minutes and then snap cooled at 4° C. for 5 minutes.

Delivery of Non-Cognate GalNAc-TREM into Hepatocytes

[1775] 100 nM of the arginine non-cognate GalNAc-TREM may be delivered gymnotically, to iPSC-derived hepatocytes cells originating from Fabry patient-derived fibroblasts.

### Translation Suppression Assay

[1776] To monitor the efficacy of the arginine non-cognate GalNAc-TREM to readthrough the PTC in the GLA ORF, 24-48 hours after transfection, cell media is replaced, and cells are lysed. Using Western blot detection, the non-cognate GalNAc-TREM efficacy is measured as the level of full-length protein expression, in this example of GLA enzyme, in the reprogrammed hepatocyte cells dosed with the Arg non-cognate TREM, in comparison to the GLA expression levels found in control hepatocyte cells not receiving the TREM. For example, as a control, cells of a person unaffected by the disease (i.e. cells having an ORF with a WT GLA transcript) may be used. It is expected that if the non-cognate GalNAc-TREM is functional, it can readthrough the PTC and the full-length protein level will be detected at higher levels than that found in reprogrammed hepatocyte cells which have not been administered the non-cognate GalNAc-TREM. If the non-cognate GalNAc-TREM is not functional, the full-length protein level will be detected at a similar level as detected in patient-derived fibroblast cells or reprogrammed hepatocyte cells which have not been administered the non-cognate GalNAc-TREM.

### Example 13: Readthrough of a Premature Termination Codon (PTC) in the Alpha-Galactosidase (GLA) ORF to Produce a Functional GLA Protein Through Administration of a TREM Comprising an ASGPR Binding Moiety

[1777] This example describes an assay to test the ability of a non-cognate GalNAc-TREM to readthrough a PTC, such as R220X, in the alpha-galactosidase (GLA) open reading frame (ORF) in hepatocytes differentiated from reprogrammed Fabry disease patient-derived cell line to generate the production of a functional GLA protein. This Example describes an arginine non-cognate GalNAc-TREM, though a non-cognate TREM specifying any one of the other 19 amino acids can be used. Fibroblast cells derived from a patient with Fabry disease having a PTC in the alpha-galactosidase (GLA) open reading frame (ORF), such as R220X, may be obtained from a center or an organization, such as the Coriell Institute (catalog #s GM00881 and GM02769). The cells can be reprogrammed and differentiated according to the exemplary protocols provided in Example 12.

[1778] To monitor the functionality of the GLA protein produced as a result of arginine non-cognate GalNAc-TREM-mediated PTC readthrough, a GLA protein activity assay may be performed using the Alpha Galactosidase Activity Assay Kit (Abcam) according to manufacturer instructions. Alternatively, GLA activity may be determined using the artificial substrate 4-methylumbelliferyl-α-D-galactoside as described previously in Desnick R J, et al. J Lab Clin Med. 1973; 81:157-71.

1. A tRNA-based effector molecule (TREM) comprising an asialoglycoprotein receptor (ASGPR) binding moiety, wherein the ASGPR binding moiety is bound to a sugar moiety (e.g., a ribose moiety), nucleobase, or the internucleotide linkage (e.g., the phosphate backbone) of a nucleotide within a TREM sequence, wherein the TREM comprises:
(i) a sequence of Formula A comprising:
[L1]_{y}-[ASt Domain1]ₓ-[L2]ₓ-[DH Domain]ₓ-[L3]ₓ-[ACH Domain]ₓ-[VL Domain]_{y}-[TH Domain]ₓ-[L4]ₓ-[ASt Domain2]ₓ, (A); and
(ii) an asialoglycoprotein receptor (ASGPR) binding moiety (e.g., a GalNAc moiety, e.g., GalNAc); and
wherein y is 0 or 1 and x is 1.

2. The TREM of claim 1, wherein the asialoglycoprotein receptor binding moiety comprises a galactose (Gal) moiety, galactosamine (GalNH₂) moiety, or N-acetylgalactosamine (GalNAc) moiety.

3. The TREM of claim 2, wherein the GalNAc moiety comprises GalNAc or an analog thereof (e.g., a triantennary GalNAc or an analog thereof).

4. The TREM of any one of claims 1-3, wherein the TREM comprises a full length TREM, a TREM Core Fragment, or a TREM Fragment.

5. The TREM of claim 1, wherein the sequence of Formula A:
(i) a sequence of Formula A comprising:
[L1]_{y}-[ASt Domain1]ₓ-[L2]ₓ-[DH Domain]ₓ-[L3]ₓ-[ACH Domain]ₓ-[VL Domain]_{y}-[TH Domain]ₓ-[L4]ₓ-[ASt Domain2]ₓ, (A); and
(ii) an asialoglycoprotein receptor (ASGPR) binding moiety (e.g., a GalNAc moiety, e.g., GalNAc);
wherein the ASGPR binding moiety is bound to a sugar moiety (e.g., a ribose moiety) or the internucleotide linkage (e.g., the phosphate backbone),
wherein y is 0 or 1 and x is 1.

6. The TREM of claim 5, wherein the ASGPR binding moiety is present on the sugar moiety (e.g., a ribose moiety) at the 2′ position of the sugar moiety.

7. The TREM of claim 6, wherein the ASGPR binding moiety is present on the sugar moiety (e.g., a ribose moiety) at the 2′ oxygen or carbon of the sugar moiety.

8. The TREM of claim 6, wherein the ASGPR binding moiety is present on a sugar moiety (e.g., a ribose moiety) at the 4′ position of the sugar moiety.

9. The TREM of claim 5, wherein the ASGPR binding moiety is bound to the phosphate backbone at any nucleotide position within the TREM.

10. The TREM of any one of claims 5-9, wherein the ASGPR binding moiety is present within a linker region.

11. The TREM of claim 10, wherein the linker region comprises L1, L2, L3, and/or L4.

12. The TREM of any one of the preceding claims, wherein the ASGPR binding moiety (e.g., a GalNAc moiety, e.g., GalNAc) is bound to the sugar moiety (e.g., ribose moiety) of a nucleotide of the TREM molecule.

13. The TREM of any one of the preceding claims, wherein the ASGPR binding moiety (e.g., a GalNAc moiety, e.g., GalNAc) is bound to the sugar (e.g., ribose) moiety of a nucleotide of the TREM via a covalent linkage (e.g., at a nitrogen or carbon atom in the sugar moiety).

14. The TREM of any one of the preceding claims, wherein the ASGPR binding moiety (e.g., a GalNAc moiety, e.g., GalNAc) is bound to a nucleobase within a nucleotide of the TREM.

15. The TREM of any one of the preceding claims, wherein the ASGPR binding moiety (e.g., a GalNAc moiety, e.g., GalNAc) is bound to a nucleobase within a nucleotide of the TREM via covalent linkage.

16. The TREM of any one of the preceding claims, wherein the ASGPR binding moiety (e.g., a GalNAc moiety, e.g., GalNAc) is bound to an adenine, uracil, cytosine, or guanosine.

17. The TREM of any one of the preceding claims, wherein the ASGPR binding moiety (e.g., a GalNAc moiety, e.g., GalNAc) is bound to a uracil.

18. The TREM of any one of the preceding claims, wherein the ASGPR binding moiety (e.g., a GalNAc moiety, e.g., GalNAc) is bound to an atom in the internucleotide linkage of the TREM.

19. The TREM of any one of claims 5-18, wherein the ASGPR binding moiety is present on a sugar moiety (e.g., ribose moiety) of a nucleotide within the AStD.

20. The TREM of any one of claims 5-19, wherein the ASGPR binding moiety is present within the ASt Domain 1 (e.g., positions 1-9).

21. The TREM of any one of claims 5-20, wherein the ASGPR binding moiety is present within the ASt Domain 2 (e.g., positions 65-76).

22. The TREM of any one of claims 5-21, wherein the ASGPR binding moiety is present within the ACHD (e.g., positions 27-43).

23. The TREM of any one of claims 5-22, wherein the ASGPR binding moiety is present within the DHD (e.g., positions 10-26).

24. The TREM of any one of claims 5-23, wherein the ASGPR binding moiety is present within the THD (e.g., positions 50-64).

25. The TREM of any one of the preceding claims, wherein the ASGPR binding moiety comprises a GalNAc moiety (e.g., a GalNAc or a GalNAc analog).

26. The TREM of any one of the preceding claims, wherein the TREM retains the ability to support protein synthesis, e.g., relative to a TREM that does not comprise an ASGPR binding moiety or a naturally occurring tRNA.

27. The TREM of any of claims 1-21, wherein the TREM retains the ability to be charged by a synthetase, e.g., relative to a TREM that does not comprise an ASGPR binding moiety or a naturally occurring tRNA.

28. The TREM of any of claims 1-22, wherein the TREM retains the ability to be bound by an elongation factor, e.g., relative to a TREM that does not comprise an ASGPR binding moiety or a naturally occurring tRNA.

29. The TREM of any of claims 1-23, wherein the TREM retains the ability to introduce an amino acid into a peptide chain, e.g., relative to a TREM that does not comprise an ASGPR binding moiety or a naturally occurring tRNA.

30. The TREM of any of claims 1-24, wherein the TREM retains the ability to support elongation or support initiation, e.g., relative to a TREM that does not comprise an ASGPR binding moiety or a naturally occurring tRNA.

31. The TREM of any one of claims 1-25, wherein the TREM has a binding affinity to an ASGPR of between 0.01 nM and 100 mM.

32. The TREM of claim 1, wherein the non-naturally occurring modification is present on the 2′-position of a nucleotide sugar or within the internucleotide region (e.g., a backbone modification).

33. The TREM of any one of the preceding claims, wherein the TREM comprises a non-naturally occurring modification.

34. The TREM of claim 33, wherein the non-naturally occurring modification is selected from a 2′-O-methyl (2-OMe), 2′-halo (e.g., 2′F or 2′Cl), 2′-O-methoxyethyl (2′MOE), or 2′deoxy modification.

35. The TREM of any one of claims 33-34, wherein the non-naturally occurring modification is a phosphorothioate modification.

36. The TREM of any one of claims 33-35, wherein the TREM comprises 1, 2, 3, 4, 5, 6, 7, 8, 9, or 10 additional non-naturally occurring modifications compared with a TREM provided in FIG. 1 (e.g., 2′-ribose modifications or an internucleotide modification, e.g., 2′OMe, 2′-halo, 2′-MOE, 2′-deoxy, or phosphorothiorate modifications).

37. The TREM of any one of the preceding claims, wherein the TREM has a sequence selected from a sequence provided in FIG. 1.

38. The TREM of any one of the preceding claims, wherein the TREM is a TREM provided in Table 12.

39. The TREM of any one of the preceding claims, wherein the TREM comprises a TREM having at least 70%, 75%, 80%, 85%, 90%, 95%, or 99% sequence identity with a TREM provided in FIG. 1.

40. The TREM of any one of the preceding claims, wherein the TREM comprises a nucleotide sequence that differs by 2, 3, 4, 5, 6, 7, 8, 9, 10, 11, 12, 13, 14, 15, 16, 17, 18, 19, or 20 nucleotides from the nucleotide sequence of a TREM provided in FIG. 1.

41. The TREM of any one of the preceding claims, wherein the TREM comprises a nucleotide sequence that differs by 10, 15, 20, 25, 30, 35 or 40 nucleotides from the nucleotide sequence of a TREM provided in FIG. 1.

42. The TREM of any one of the preceding claims, wherein the TREM comprises a nucleotide sequence that differs by more than 5 nucleotides from the nucleotide sequence of a TREM provided in FIG. 1.

43. The TREM of any one of the preceding claims, wherein the TREM comprises a nucleotide sequence that differs by more than 10 nucleotides from the nucleotide sequence of a TREM provided in FIG. 1.

44. The TREM of any one of the preceding claims, wherein the TREM comprises a sequence that differs by no more than 1, 2, 3, 4, 5, 6, 7, 8, 9, or 10 nucleotides from the nucleotide sequence of a TREM provided in FIG. 1.

45. The TREM of any one of the preceding claims, wherein the TREM comprises a nucleotide sequence that differs by no more than 10, 15, 20, 25, 30, 35 or 40 nucleotides from the nucleotide sequence of a TREM provided in FIG. 1.

46. The TREM of any one of the preceding claims, wherein the TREM comprises a nucleotide sequence that differs by no more than 1 nucleotide from the nucleotide sequence of a TREM provided in FIG. 1.

47. The TREM of any one of the preceding claims, wherein the TREM comprises a nucleotide sequence that differs by no more than 5 nucleotides from the nucleotide sequence of a TREM provided in FIG. 1.

48. The TREM of any one of the preceding claims, wherein the TREM comprises a nucleotide sequence that differs by no more than 10 nucleotides from the nucleotide sequence of a TREM provided in FIG. 1.

49. The TREM of any one of the preceding claims, wherein the TREM is selected from SEQ NOs. 622-1116 in FIG. 1.

50. A pharmaceutical composition comprising a TREM entity (e.g., a TREM) of any one of claims 1-49.

51. A lipid nanoparticle comprising a TREM of any one of claims 1-49 or a pharmaceutical composition of claim 50.

52. A method of making a TREM entity (e.g., a TREM) of any one of claims 1-49.

53. A method of treating a subject having a disease or disorder associated with a PTC, comprising administering to the subject a TREM comprising an ASGPR binding moiety described herein (e.g., a TREM of any one of claims 1-49) or a pharmaceutical composition of claim 50 or a lipid nanoparticle formulation of claim 51, thereby treating the subject having the disease or disorder.

54. The method of claim 53, wherein the subject is a human.

55. A composition for use in treating a subject having a disease or disorder associated with a PTC, wherein the composition for use comprises a comprising an ASGPR binding moiety described herein (e.g., a TREM of any one of claims 1-49) or a pharmaceutical composition of claim 50 or a lipid nanoparticle formulation of claim 51.

The application's sequence listing, which the Patent Office published only in electronic form, follows.

SEQUENCE LISTING (1289 sequences)

SEQ ID NO: 1 - DNA, 72 bp, synthetic construct
  source 1..72: mol_type = other DNA
gggggtatagctcagtggtagagcgcgtgcttagcatgcacgaggtcctgggttcgatccccagtacctcca

SEQ ID NO: 2 - DNA, 73 bp, synthetic construct
  source 1..73: mol_type = other DNA
ggggaattagctcaagtggtagagcgcttgcttagcacgcaagaggtagtgggatcgatgcccacattctcca

SEQ ID NO: 3 - DNA, 73 bp, synthetic construct
  source 1..73: mol_type = other DNA
ggggaattagctcaaatggtagagcgctcgcttagcatgcgagaggtagcgggatcgatgcccgcattctcca

SEQ ID NO: 4 - DNA, 73 bp, synthetic construct
  source 1..73: mol_type = other DNA
ggggaattagctcaagtggtagagcgcttgcttagcatgcaagaggtagtgggatcgatgcccacattctcca

SEQ ID NO: 5 - DNA, 73 bp, synthetic construct
  source 1..73: mol_type = other DNA
ggggaattagctcaagcggtagagcgcttgcttagcatgcaagaggtagtgggatcgatgcccacattctcca

SEQ ID NO: 6 - DNA, 73 bp, synthetic construct
  source 1..73: mol_type = other DNA
ggggaattagctcaagtggtagagcgcttgcttagcatgcaagaggtagtgggatcaatgcccacattctcca

SEQ ID NO: 7 - DNA, 73 bp, synthetic construct
  source 1..73: mol_type = other DNA
ggggaattagctcaagtggtagagcgctcgcttagcatgcgagaggtagtgggatcgatgcccgcattctcca

SEQ ID NO: 8 - DNA, 73 bp, synthetic construct
  source 1..73: mol_type = other DNA
ggggaattagcccaagtggtagagcgcttgcttagcatgcaagaggtagtgggatcgatgcccacattctcca

SEQ ID NO: 9 - DNA, 72 bp, synthetic construct
  source 1..72: mol_type = other DNA
gggggtgtagctcagtggtagagcgcgtgcttagcatgcacgaggccccgggttcaatccccggcacctcca

SEQ ID NO: 10 - DNA, 72 bp, synthetic construct
  source 1..72: mol_type = other DNA
gggggtgtagctcagtggtagagcgcgtgcttagcatgtacgaggtcccgggttcaatccccggcacctcca

SEQ ID NO: 11 - DNA, 72 bp, synthetic construct
  source 1..72: mol_type = other DNA
ggggatgtagctcagtggtagagcgcatgcttagcatgcatgaggtcccgggttcgatccccagcatctcca

SEQ ID NO: 12 - DNA, 72 bp, synthetic construct
  source 1..72: mol_type = other DNA
gggggtgtagctcagtggtagagcgcgtgcttagcatgcacgaggccctgggttcaatccccagcacctcca

SEQ ID NO: 13 - DNA, 72 bp, synthetic construct
  source 1..72: mol_type = other DNA
gggggtatagctcagcggtagagcgcgtgcttagcatgcacgaggtcctgggttcaatccccaatacctcca

SEQ ID NO: 14 - DNA, 72 bp, synthetic construct
  source 1..72: mol_type = other DNA
gggggtgtagctcagtggtagagcgcgtgcttagcatgcacgaggccccgggttcaatccctggcacctcca

SEQ ID NO: 15 - DNA, 73 bp, synthetic construct
  source 1..73: mol_type = other DNA
gggggattagctcaaatggtagagcgctcgcttagcatgcgagaggtagcgggatcgatgcccgcatcctcca

SEQ ID NO: 16 - DNA, 73 bp, synthetic construct
  source 1..73: mol_type = other DNA
ggggaattagctcaggcggtagagcgctcgcttagcatgcgagaggtagcgggatcgacgcccgcattctcca

SEQ ID NO: 17 - DNA, 72 bp, synthetic construct
  source 1..72: mol_type = other DNA
ggggatgtagctcagtggtagagcgcatgcttcgcatgtatgaggtcccgggttcgatccccggcatctcca

SEQ ID NO: 18 - DNA, 72 bp, synthetic construct
  source 1..72: mol_type = other DNA
ggggatgtagctcagtggtagagcgcatgcttcgcatgtatgaggccccgggttcgatccccggcatctcca

SEQ ID NO: 19 - DNA, 72 bp, synthetic construct
  source 1..72: mol_type = other DNA
ggggatgtagctcagtggtagagcgcgcgcttcgcatgtgtgaggtcccgggttcaatccccggcatctcca

SEQ ID NO: 20 - DNA, 72 bp, synthetic construct
  source 1..72: mol_type = other DNA
gggggtgtagctcagtggtagagcgcgtgcttcgcatgtacgaggccccgggttcgacccccggctcctcca

SEQ ID NO: 21 - DNA, 72 bp, synthetic construct
  source 1..72: mol_type = other DNA
gggggtgtagctcagtggtagagcgcatgctttgcatgtatgaggtcccgggttcgatccccggcacctcca

SEQ ID NO: 22 - DNA, 72 bp, synthetic construct
  source 1..72: mol_type = other DNA
ggggatgtagctcagtggtagagcgcatgctttgcatgtatgaggtcccgggttcgatccccggcatctcca

SEQ ID NO: 23 - DNA, 72 bp, synthetic construct
  source 1..72: mol_type = other DNA
ggggatgtagctcagtggtagagcgcatgctttgcatgtatgaggccccgggttcgatccccggcatctcca

SEQ ID NO: 24 - DNA, 72 bp, synthetic construct
  source 1..72: mol_type = other DNA
ggggatgtagctcagtggtagagcgcatgctttgcacgtatgaggccccgggttcaatccccggcatctcca

SEQ ID NO: 25 - DNA, 72 bp, synthetic construct
  source 1..72: mol_type = other DNA
gggggtgtagctcagtggtagagcgcatgctttgcatgtatgaggcctcgggttcgatccccgacacctcca

SEQ ID NO: 26 - DNA, 72 bp, synthetic construct
  source 1..72: mol_type = other DNA
gggggtgtagctcagtggtagagcacatgctttgcatgtgtgaggccccgggttcgatccccggcacctcca

SEQ ID NO: 27 - DNA, 71 bp, synthetic construct
  source 1..71: mol_type = other DNA
gggggtgtagctcagtggtagagcgcatgctttgcatgtatgaggcctcggttcgatccccgacacctcca

SEQ ID NO: 28 - DNA, 73 bp, synthetic construct
  source 1..73: mol_type = other DNA
gggccagtggcgcaatggataacgcgtctgactacggatcagaagattccaggttcgactcctggctggctcg

SEQ ID NO: 29 - DNA, 73 bp, synthetic construct
  source 1..73: mol_type = other DNA
gggccagtggcgcaatggataacgcgtctgactacggatcagaagattctaggttcgactcctggctggctcg

SEQ ID NO: 30 - DNA, 73 bp, synthetic construct
  source 1..73: mol_type = other DNA
ggccgcgtggcctaatggataaggcgtctgattccggatcagaagattgagggttcgagtcccttcgtggtcg

SEQ ID NO: 31 - DNA, 73 bp, synthetic construct
  source 1..73: mol_type = other DNA
gacccagtggcctaatggataaggcatcagcctccggagctggggattgtgggttcgagtcccatctgggtcg

SEQ ID NO: 32 - DNA, 73 bp, synthetic construct
  source 1..73: mol_type = other DNA
gccccagtggcctaatggataaggcactggcctcctaagccagggattgtgggttcgagtcccacctggggta

SEQ ID NO: 33 - DNA, 73 bp, synthetic construct
  source 1..73: mol_type = other DNA
gccccagtggcctaatggataaggcactggcctcctaagccagggattgtgggttcgagtcccacctggggtg

SEQ ID NO: 34 - DNA, 73 bp, synthetic construct
  source 1..73: mol_type = other DNA
gccccggtggcctaatggataaggcattggcctcctaagccagggattgtgggttcgagtcccacccggggta

SEQ ID NO: 35 - DNA, 73 bp, synthetic construct
  source 1..73: mol_type = other DNA
gccccagtggcctaatggataaggcattggcctcctaagccagggattgtgggttcgagtcccatctggggtg

SEQ ID NO: 36 - DNA, 73 bp, synthetic construct
  source 1..73: mol_type = other DNA
gccccagtggcctgatggataaggtactggcctcctaagccagggattgtgggttcgagttccacctggggta

SEQ ID NO: 37 - DNA, 73 bp, synthetic construct
  source 1..73: mol_type = other DNA
ggccgcgtggcctaatggataaggcgtctgacttcggatcagaagattgcaggttcgagtcctgccgcggtcg

SEQ ID NO: 38 - DNA, 73 bp, synthetic construct
  source 1..73: mol_type = other DNA
gaccacgtggcctaatggataaggcgtctgacttcggatcagaagattgagggttcgaatccctccgtggtta

SEQ ID NO: 39 - DNA, 73 bp, synthetic construct
  source 1..73: mol_type = other DNA
gaccgcgtggcctaatggataaggcgtctgacttcggatcagaagattgagggttcgagtcccttcgtggtcg

SEQ ID NO: 40 - DNA, 73 bp, synthetic construct
  source 1..73: mol_type = other DNA
gaccacgtggcctaatggataaggcgtctgacttcggatcagaagattgagggttcgaatcccttcgtggtta

SEQ ID NO: 41 - DNA, 73 bp, synthetic construct
  source 1..73: mol_type = other DNA
gaccacgtggcctaatggataaggcgtctgacttcggatcagaagattgagggttcgaatcccttcgtggttg

SEQ ID NO: 42 - DNA, 73 bp, synthetic construct
  source 1..73: mol_type = other DNA
ggccgtgtggcctaatggataaggcgtctgacttcggatcaaaagattgcaggtttgagttctgccacggtcg

SEQ ID NO: 43 - DNA, 85 bp, synthetic construct
  source 1..85: mol_type = other DNA
ggctccgtggcgcaatggatagcgcattggacttctagaggctgaaggcattcaaaggttccgggttcgagtcccggcggagtcg

SEQ ID NO: 44 - DNA, 88 bp, synthetic construct
  source 1..88: mol_type = other DNA
ggctctgtggcgcaatggatagcgcattggacttctagtgacgaatagagcaattcaaaggttgtgggttcgaatcccaccagagtcg

SEQ ID NO: 45 - DNA, 91 bp, synthetic construct
  source 1..91: mol_type = other DNA
ggctctgtggcgcaatggatagcgcattggacttctagctgagcctagtgtggtcattcaaaggttgtgggttcgagtcccaccagagtcg

SEQ ID NO: 46 - DNA, 86 bp, synthetic construct
  source 1..86: mol_type = other DNA
ggctctgtggcgcaatggatagcgcattggacttctagatagttagagaaattcaaaggttgtgggttcgagtcccaccagagtcg

SEQ ID NO: 47 - DNA, 74 bp, synthetic construct
  source 1..74: mol_type = other DNA
gtctctgtggcgcaatggacgagcgcgctggacttctaatccagaggttccgggttcgagtcccggcagagatg

SEQ ID NO: 48 - DNA, 87 bp, synthetic construct
  source 1..87: mol_type = other DNA
ggctctgtggcgcaatggatagcgcattggacttctagcctaaatcaagagattcaaaggttgcgggttcgagtccctccagagtcg

SEQ ID NO: 49 - DNA, 74 bp, synthetic construct
  source 1..74: mol_type = other DNA
gtctctgtggcgcaatcggttagcgcgttcggctgttaaccgaaaggttggtggttcgatcccacccagggacg

SEQ ID NO: 50 - DNA, 74 bp, synthetic construct
  source 1..74: mol_type = other DNA
gtctctgtggcgcaatcggctagcgcgtttggctgttaactaaaaggttggcggttcgaacccacccagaggcg

SEQ ID NO: 51 - DNA, 74 bp, synthetic construct
  source 1..74: mol_type = other DNA
gtctctgtggtgcaatcggttagcgcgttccgctgttaaccgaaagcttggtggttcgagcccacccagggatg

SEQ ID NO: 52 - DNA, 74 bp, synthetic construct
  source 1..74: mol_type = other DNA
gtctctgtggcgcaatcggctagcgcgtttggctgttaactaaaaagttggtggttcgaacacacccagaggcg

SEQ ID NO: 53 - DNA, 74 bp, synthetic construct
  source 1..74: mol_type = other DNA
gtctctgtggcgcaatcggttagcgcgttcggctgttaaccgaaaggttggtggttcgagcccacccagggacg

SEQ ID NO: 54 - DNA, 74 bp, synthetic construct
  source 1..74: mol_type = other DNA
gtctctgtggcgcaatcggttagcgcattcggctgttaaccgaaaggttggtggttcgagcccacccagggacg

SEQ ID NO: 55 - DNA, 74 bp, synthetic construct
  source 1..74: mol_type = other DNA
gtctctgtggcgcaatcggttagcgcgttcggctgttaaccgaaagattggtggttcgagcccacccagggacg

SEQ ID NO: 56 - DNA, 74 bp, synthetic construct
  source 1..74: mol_type = other DNA
gtctctgtggcgcaatcggttagcgcgttcggctgttaactgaaaggttggtggttcgagcccacccagggacg

SEQ ID NO: 57 - DNA, 74 bp, synthetic construct
  source 1..74: mol_type = other DNA
gtctctgtggcgcaatgggttagcgcgttcggctgttaaccgaaaggttggtggttcgagcccatccagggacg

SEQ ID NO: 58 - DNA, 74 bp, synthetic construct
  source 1..74: mol_type = other DNA
gtctctgtggcgtagtcggttagcgcgttcggctgttaaccgaaaagttggtggttcgagcccacccaggaacg

SEQ ID NO: 59 - DNA, 74 bp, synthetic construct
  source 1..74: mol_type = other DNA
gtctctgtggcgcaatcggctagcgcgtttggctgttaactaaaaggttggtggttcgaacccacccagaggcg

SEQ ID NO: 60 - DNA, 74 bp, synthetic construct
  source 1..74: mol_type = other DNA
gtctctgtggcgcaatcggttagcgcgttcggctgttaactgaaaggttagtggttcgagcccacccggggacg

SEQ ID NO: 61 - DNA, 72 bp, synthetic construct
  source 1..72: mol_type = other DNA
tcctcgttagtatagtggttagtatccccgcctgtcacgcgggagaccggggttcaattccccgacggggag

SEQ ID NO: 62 - DNA, 72 bp, synthetic construct
  source 1..72: mol_type = other DNA
tcctcgttagtatagtggtgagtatccccgcctgtcacgcgggagaccggggttcgattccccgacggggag

SEQ ID NO: 63 - DNA, 72 bp, synthetic construct
  source 1..72: mol_type = other DNA
tcctcgttagtatagtggtgagtgtccccgtctgtcacgcgggagaccggggttcgattccccgacggggag

SEQ ID NO: 64 - DNA, 72 bp, synthetic construct
  source 1..72: mol_type = other DNA
gggggcatagctcagtggtagagcatttgactgcagatcaagaggtccctggttcaaatccaggtgccccct

SEQ ID NO: 65 - DNA, 72 bp, synthetic construct
  source 1..72: mol_type = other DNA
gggggtatagctcaggggtagagcatttgactgcagatcaagaggtccctggttcaaatccaggtgcccccc

SEQ ID NO: 66 - DNA, 72 bp, synthetic construct
  source 1..72: mol_type = other DNA
gggggtatagcttagcggtagagcatttgactgcagatcaagaggtccccggttcaaatccgggtgccccct

SEQ ID NO: 67 - DNA, 72 bp, synthetic construct
  source 1..72: mol_type = other DNA
gggggtatagcttaggggtagagcatttgactgcagatcaaaaggtccctggttcaaatccaggtgcccctt

SEQ ID NO: 68 - DNA, 72 bp, synthetic construct
  source 1..72: mol_type = other DNA
gggggtatagctcaggggtagagcatttgactgcagatcaagaggtccccagttcaaatctgggtgccccct

SEQ ID NO: 69 - DNA, 72 bp, synthetic construct
  source 1..72: mol_type = other DNA
gggggtatagctcaggggtagagcatttgactgcagatcaagaagtccccggttcaaatccgggtgccccct

SEQ ID NO: 70 - DNA, 72 bp, synthetic construct
  source 1..72: mol_type = other DNA
gggggtatagctcaggggtagagcatttgactgcagatcaagaggtctctggttcaaatccaggtgccccct

SEQ ID NO: 71 - DNA, 72 bp, synthetic construct
  source 1..72: mol_type = other DNA
gggggtatagctcaggggtagagcacttgactgcagatcaagaagtccttggttcaaatccaggtgccccct

SEQ ID NO: 72 - DNA, 72 bp, synthetic construct
  source 1..72: mol_type = other DNA
ggggatatagctcaggggtagagcatttgactgcagatcaagaggtccccggttcaaatccgggtgcccccc

SEQ ID NO: 73 - DNA, 72 bp, synthetic construct
  source 1..72: mol_type = other DNA
gggggtatagttcaggggtagagcatttgactgcagatcaagaggtccctggttcaaatccaggtgccccct

SEQ ID NO: 74 - DNA, 72 bp, synthetic construct
  source 1..72: mol_type = other DNA
gggggtatagctcaggggtagagcatttgactgcaaatcaagaggtccctgattcaaatccaggtgccccct

SEQ ID NO: 75 - DNA, 72 bp, synthetic construct
  source 1..72: mol_type = other DNA
gggggtatagctcagtggtagagcatttgactgcagatcaagaggtccccggttcaaatccgggtgccccct

SEQ ID NO: 76 - DNA, 72 bp, synthetic construct
  source 1..72: mol_type = other DNA
gggcgtatagctcaggggtagagcatttgactgcagatcaagaggtccccagttcaaatctgggtgccccct

SEQ ID NO: 77 - DNA, 72 bp, synthetic construct
  source 1..72: mol_type = other DNA
gggggtatagctcacaggtagagcatttgactgcagatcaagaggtccccggttcaaatctgggtgccccct

SEQ ID NO: 78 - DNA, 70 bp, synthetic construct
  source 1..70: mol_type = other DNA
gggcgtatagctcaggggtagagcatttgactgcagatcaagaggtccccagttcaaatctgggtgccca

SEQ ID NO: 79 - DNA, 72 bp, synthetic construct
  source 1..72: mol_type = other DNA
gggggtatagctcacaggtagagcatttgactgcagatcaagaggtccccggttcaaatccggttactccct

SEQ ID NO: 80 - DNA, 72 bp, synthetic construct
  source 1..72: mol_type = other DNA
gggggtatagctcaggggtagagcacttgactgcagatcaagaggtccctggttcaaatccaggtgccccct

SEQ ID NO: 81 - DNA, 72 bp, synthetic construct
  source 1..72: mol_type = other DNA
gggggtatagctcagtggtagagcatttgactgcagatcaagaggtccctggttcaaatccgggtgccccct

SEQ ID NO: 82 - DNA, 73 bp, synthetic construct
  source 1..73: mol_type = other DNA
gggggtatagctcagtgggtagagcatttgactgcagatcaagaggtccccggttcaaatccgggtgccccct

SEQ ID NO: 83 - DNA, 72 bp, synthetic construct
  source 1..72: mol_type = other DNA
gggggtgtagctcagtggtagagcatttgactgcagatcaagaggtccctggttcaaatccaggtgccccct

SEQ ID NO: 84 - DNA, 73 bp, synthetic construct
  source 1..73: mol_type = other DNA
gggggtatagctcaggtggtagagcatttgactgcagatcaagaggtccccggttcaaatccgggtgccccct

SEQ ID NO: 85 - DNA, 72 bp, synthetic construct
  source 1..72: mol_type = other DNA
gggggtatagctcaggggtagagcatttgactgcagatcaagaggtccccggttcaaatccgggtgccccct

SEQ ID NO: 86 - DNA, 72 bp, synthetic construct
  source 1..72: mol_type = other DNA
gggggtatagctcaggggtagagcatttgactgcagatcaagaggtccctggttcaaatccaggtgccccct

SEQ ID NO: 87 - DNA, 72 bp, synthetic construct
  source 1..72: mol_type = other DNA
ggttccatggtgtaatggttagcactctggactctgaatccagcgatccgagttcaaatctcggtggaacct

SEQ ID NO: 88 - DNA, 72 bp, synthetic construct
  source 1..72: mol_type = other DNA
ggttccatggtgtaatggttagcactctggactctgaatccagcgatccgagttcaagtctcggtggaacct

SEQ ID NO: 89 - DNA, 72 bp, synthetic construct
  source 1..72: mol_type = other DNA
ggttccatggtgtaatggtgagcactctggactctgaatccagcgatccgagttcgagtctcggtggaacct

SEQ ID NO: 90 - DNA, 72 bp, synthetic construct
  source 1..72: mol_type = other DNA
ggttccatggtgtaatggtaagcactctggactctgaatccagcgatccgagttcgagtctcggtggaacct

SEQ ID NO: 91 - DNA, 72 bp, synthetic construct
  source 1..72: mol_type = other DNA
ggttccatggtgtaatggttagcactctggactctgaatccggtaatccgagttcaaatctcggtggaacct

SEQ ID NO: 92 - DNA, 72 bp, synthetic construct
  source 1..72: mol_type = other DNA
ggccccatggtgtaatggtcagcactctggactctgaatccagcgatccgagttcaaatctcggtgggaccc

SEQ ID NO: 93 - DNA, 72 bp, synthetic construct
  source 1..72: mol_type = other DNA
ggttccatggtgtaatggtaagcactctggactctgaatccagccatctgagttcgagtctctgtggaacct

SEQ ID NO: 94 - DNA, 72 bp, synthetic construct
  source 1..72: mol_type = other DNA
ggtcccatggtgtaatggttagcactctggactttgaatccagcgatccgagttcaaatctcggtgggacct

SEQ ID NO: 95 - DNA, 72 bp, synthetic construct
  source 1..72: mol_type = other DNA
ggtcccatggtgtaatggttagcactctggactttgaatccagcaatccgagttcgaatctcggtgggacct

SEQ ID NO: 96 - DNA, 72 bp, synthetic construct
  source 1..72: mol_type = other DNA
ggccccatggtgtaatggttagcactctggactttgaatccagcgatccgagttcaaatctcggtgggacct

SEQ ID NO: 97 - DNA, 72 bp, synthetic construct
  source 1..72: mol_type = other DNA
ggtcccatggtgtaatggttagcactctgggctttgaatccagcaatccgagttcgaatcttggtgggacct

SEQ ID NO: 98 - DNA, 72 bp, synthetic construct
  source 1..72: mol_type = other DNA
tccctggtggtctagtggttaggattcggcgctctcaccgccgcggcccgggttcgattcccggtcagggaa

SEQ ID NO: 99 - DNA, 72 bp, synthetic construct
  source 1..72: mol_type = other DNA
tccctggtggtctagtggttaggattcggcgctctcaccgccgcggcccgggttcgattcccggtcaggaaa

SEQ ID NO: 100 - DNA, 72 bp, synthetic construct
  source 1..72: mol_type = other DNA
tcccatatggtctagcggttaggattcctggttttcacccaggtggcccgggttcgactcccggtatgggaa

SEQ ID NO: 101 - DNA, 72 bp, synthetic construct
  source 1..72: mol_type = other DNA
tcccacatggtctagcggttaggattcctggttttcacccaggcggcccgggttcgactcccggtgtgggaa

SEQ ID NO: 102 - DNA, 72 bp, synthetic construct
  source 1..72: mol_type = other DNA
tccctggtggtctagtggctaggattcggcgctttcaccgccgcggcccgggttcgattcccggccagggaa

SEQ ID NO: 103 - DNA, 72 bp, synthetic construct
  source 1..72: mol_type = other DNA
tccctggtggtctagtggctaggattcggcgctttcaccgccgcggcccgggttcgattcccggtcagggaa

SEQ ID NO: 104 - DNA, 71 bp, synthetic construct
  source 1..71: mol_type = other DNA
gcattggtggttcagtggtagaattctcgcctcccacgcgggagacccgggttcaattcccggccaatgca

SEQ ID NO: 105 - DNA, 71 bp, synthetic construct
  source 1..71: mol_type = other DNA
gcgccgctggtgtagtggtatcatgcaagattcccattcttgcgacccgggttcgattcccgggcggcgca

SEQ ID NO: 106 - DNA, 71 bp, synthetic construct
  source 1..71: mol_type = other DNA
gcattggtggttcaatggtagaattctcgcctcccacgcaggagacccaggttcgattcctggccaatgca

SEQ ID NO: 107 - DNA, 71 bp, synthetic construct
  source 1..71: mol_type = other DNA
gcatgggtggttcagtggtagaattctcgcctgccacgcgggaggcccgggttcgattcccggcccatgca

SEQ ID NO: 108 - DNA, 71 bp, synthetic construct
  source 1..71: mol_type = other DNA
gcattggtggttcagtggtagaattctcgcctgccacgcgggaggcccgggttcgattcccggccaatgca

SEQ ID NO: 109 - DNA, 71 bp, synthetic construct
  source 1..71: mol_type = other DNA
gcattggtggttcagtggtagaattctcgcctgccacgcgggaggcccgggtttgattcccggccagtgca

SEQ ID NO: 110 - DNA, 71 bp, synthetic construct
  source 1..71: mol_type = other DNA
gcataggtggttcagtggtagaattcttgcctgccacgcaggaggcccaggtttgattcctggcccatgca

SEQ ID NO: 111 - DNA, 71 bp, synthetic construct
  source 1..71: mol_type = other DNA
gcattggtggttcagtggtagaattctcgcctgccatgcgggcggccgggcttcgattcctggccaatgca

SEQ ID NO: 112 - DNA, 72 bp, synthetic construct
  source 1..72: mol_type = other DNA
gcgttggtggtatagtggttagcatagctgccttccaagcagttgacccgggttcgattcccggccaacgca

SEQ ID NO: 113 - DNA, 72 bp, synthetic construct
  source 1..72: mol_type = other DNA
gcgttggtggtatagtggtgagcatagctgccttccaagcagttgacccgggttcgattcccggccaacgca

SEQ ID NO: 114 - DNA, 72 bp, synthetic construct
  source 1..72: mol_type = other DNA
gcgttggtggtatagtggtaagcatagctgccttccaagcagttgacccgggttcgattcccggccaacgca

SEQ ID NO: 115 - DNA, 72 bp, synthetic construct
  source 1..72: mol_type = other DNA
gcgttggtggtatagtggtgagcatagttgccttccaagcagttgacccgggctcgattcccgcccaacgca

SEQ ID NO: 116 - DNA, 72 bp, synthetic construct
  source 1..72: mol_type = other DNA
gccgtgatcgtatagtggttagtactctgcgttgtggccgcagcaacctcggttcgaatccgagtcacggca

SEQ ID NO: 117 - DNA, 72 bp, synthetic construct
  source 1..72: mol_type = other DNA
gccatgatcgtatagtggttagtactctgcgctgtggccgcagcaacctcggttcgaatccgagtcacggca

SEQ ID NO: 118 - DNA, 74 bp, synthetic construct
  source 1..74: mol_type = other DNA
ggccggttagctcagttggttagagcgtggcgctaataacgccaaggtcgcgggttcgatccccgtacgggcca

SEQ ID NO: 119 - DNA, 74 bp, synthetic construct
  source 1..74: mol_type = other DNA
ggccggttagctcagttggttagagcgtggtgctaataacgccaaggtcgcgggttcgatccccgtactggcca

SEQ ID NO: 120 - DNA, 74 bp, synthetic construct
  source 1..74: mol_type = other DNA
ggctggttagctcagttggttagagcgtggtgctaataacgccaaggtcgcgggttcgatccccgtactggcca

SEQ ID NO: 121 - DNA, 74 bp, synthetic construct
  source 1..74: mol_type = other DNA
ggccggttagctcagttggttagagcgtggtgctaataacgccaaggtcgcgggttcgaaccccgtacgggcca

SEQ ID NO: 122 - DNA, 74 bp, synthetic construct
  source 1..74: mol_type = other DNA
ggccggttagctcagttggttagagcgtggtgctaataacgccaaggtcgcgggttcgatccccgtacgggcca

SEQ ID NO: 123 - DNA, 74 bp, synthetic construct
  source 1..74: mol_type = other DNA
ggccggttagctcagttggttagagcgtggtgctaataacgctaaggtcgcgggttcgatccccgtactggcca

SEQ ID NO: 124 - DNA, 74 bp, synthetic construct
  source 1..74: mol_type = other DNA
ggccggttagctcagttggtcagagcgtggtgctaataacgccaaggtcgcgggttcgatccccgtacgggcca

SEQ ID NO: 125 - DNA, 74 bp, synthetic construct
  source 1..74: mol_type = other DNA
ggccggttagctcagtcggctagagcgtggtgctaataacgccaaggtcgcgggttcgatccccgtacgggcca

SEQ ID NO: 126 - DNA, 74 bp, synthetic construct
  source 1..74: mol_type = other DNA
ggctggttagttcagttggttagagcgtggtgctaataacgccaaggtcgtgggttcgatccccatatcggcca

SEQ ID NO: 127 - DNA, 74 bp, synthetic construct
  source 1..74: mol_type = other DNA
ggccggttagctcagttggtaagagcgtggtgctgataacaccaaggtcgcgggctcgactcccgcaccggcca

SEQ ID NO: 128 - DNA, 93 bp, synthetic construct
  source 1..93: mol_type = other DNA
gctccagtggcgcaatcggttagcgcgcggtacttatatgacagtgcgagcggagcaatgccgaggttgtgagttcgatcctcacctggagca

SEQ ID NO: 129 - DNA, 93 bp, synthetic construct
  source 1..93: mol_type = other DNA
gctccagtggcgcaatcggttagcgcgcggtacttatacagcagtacatgcagagcaatgccgaggttgtgagttcgagcctcacctggagca

SEQ ID NO: 130 - DNA, 94 bp, synthetic construct
  source 1..94: mol_type = other DNA
gctccagtggcgcaatcggttagcgcgcggtacttatatggcagtatgtgtgcgagtgatgccgaggttgtgagttcgagcctcacctggagca

SEQ ID NO: 131 - DNA, 94 bp, synthetic construct
  source 1..94: mol_type = other DNA
gctccagtggcgcaatcggttagcgcgcggtacttatacaacagtatatgtgcgggtgatgccgaggttgtgagttcgagcctcacctggagca

SEQ ID NO: 132 - DNA, 94 bp, synthetic construct
  source 1..94: mol_type = other DNA
gctccagtggcgcaatcggttagcgcgcggtacttataagacagtgcacctgtgagcaatgccgaggttgtgagttcaagcctcacctggagca

SEQ ID NO: 133 - DNA, 82 bp, synthetic construct
  source 1..82: mol_type = other DNA
ggtagcgtggccgagcggtctaaggcgctggattaaggctccagtctcttcggaggcgtgggttcgaatcccaccgctgcca

SEQ ID NO: 134 - DNA, 82 bp, synthetic construct
  source 1..82: mol_type = other DNA
ggtagcgtggccgagcggtctaaggcgctggattaaggctccagtctcttcgggggcgtgggttcgaatcccaccgctgcca

SEQ ID NO: 135 - DNA, 82 bp, synthetic construct
  source 1..82: mol_type = other DNA
ggtagcgtggccgagcggtctaaggcgctggattaaggctccagtctcttcgggggcgtgggttcaaatcccaccgctgcca

SEQ ID NO: 136 - DNA, 82 bp, synthetic construct
  source 1..82: mol_type = other DNA
ggtagcgtggccgagtggtctaagacgctggattaaggctccagtctcttcgggggcgtgggtttgaatcccaccgctgcca

SEQ ID NO: 137 - DNA, 106 bp, synthetic construct
  source 1..106: mol_type = other DNA
gtcaggatggccgagtggtctaaggcgccagactcaagctaagcttcctccgcggtggggattctggtctccaatggaggcgtgggttcgaatcccacttctgaca

SEQ ID NO: 138 - DNA, 105 bp, synthetic construct
  source 1..105: mol_type = other DNA
gtcaggatggccgagtggtctaaggcgccagactcaagcttggcttcctcgtgttgaggattctggtctccaatggaggcgtgggttcgaatcccacttctgaca

SEQ ID NO: 139 - DNA, 108 bp, synthetic construct
  source 1..108: mol_type = other DNA
gtcaggatggccgagtggtctaaggcgccagactcaagcttactgcttcctgtgttcgggtcttctggtctccgtatggaggcgtgggttcgaatcccacttctgaca

SEQ ID NO: 140 - DNA, 107 bp, synthetic construct
  source 1..107: mol_type = other DNA
gtcaggatggccgagtggtctaaggcgccagactcaagttgctacttcccaggtttggggcttctggtctccgcatggaggcgtgggttcgaatcccacttctgaca

SEQ ID NO: 141 - DNA, 106 bp, synthetic construct
  source 1..106: mol_type = other DNA
gtcaggatggccgagtggtctaaggcgccagactcaaggtaagcaccttgcctgcgggctttctggtctccggatggaggcgtgggttcgaatcccacttctgaca

SEQ ID NO: 142 - DNA, 74 bp, synthetic construct
  source 1..74: mol_type = other DNA
gcctccttagtgcagtaggtagcgcatcagtctcaaaatctgaatggtcctgagttcaagcctcagagggggca

SEQ ID NO: 143 - DNA, 84 bp, synthetic construct
  source 1..84: mol_type = other DNA
gtcaggatggccgagcagtcttaaggcgctgcgttcaaatcgcaccctccgctggaggcgtgggttcgaatcccacttttgaca

SEQ ID NO: 144 - DNA, 83 bp, synthetic construct
  source 1..83: mol_type = other DNA
gtcaggatggccgagcggtctaaggcgctgcgttcaggtcgcagtctcccctggaggcgtgggttcgaatcccactcctgaca

SEQ ID NO: 145 - DNA, 83 bp, synthetic construct
  source 1..83: mol_type = other DNA
gtcaggatggccgagcggtctaaggcgctgcgttcaggtcgcagtctcccctggaggcgtgggttcgaatcccacttctgaca

SEQ ID NO: 146 - DNA, 83 bp, synthetic construct
  source 1..83: mol_type = other DNA
accaggatggccgagtggttaaggcgttggacttaagatccaatggacatatgtccgcgtgggttcgaaccccactcctggta

SEQ ID NO: 147 - DNA, 83 bp, synthetic construct
  source 1..83: mol_type = other DNA
accgggatggccgagtggttaaggcgttggacttaagatccaatgggctggtgcccgcgtgggttcgaaccccactctcggta

SEQ ID NO: 148 - DNA, 83 bp, synthetic construct
  source 1..83: mol_type = other DNA
accagaatggccgagtggttaaggcgttggacttaagatccaatggattcatatccgcgtgggttcgaaccccacttctggta

SEQ ID NO: 149 - DNA, 83 bp, synthetic construct
  source 1..83: mol_type = other DNA
accgggatggctgagtggttaaggcgttggacttaagatccaatggacaggtgtccgcgtgggttcgagccccactcccggta

SEQ ID NO: 150 - DNA, 82 bp, synthetic construct
  source 1..82: mol_type = other DNA
ggtagcgtggccgagcggtctaaggcgctggatttaggctccagtctcttcggaggcgtgggttcgaatcccaccgctgcca

SEQ ID NO: 151 - DNA, 82 bp, synthetic construct
  source 1..82: mol_type = other DNA
ggtagtgtggccgagcggtctaaggcgctggatttaggctccagtctcttcgggggcgtgggttcgaatcccaccactgcca

SEQ ID NO: 152 - DNA, 82 bp, synthetic construct
  source 1..82: mol_type = other DNA
ggtagcgtggccgagtggtctaaggcgctggatttaggctccagtcatttcgatggcgtgggttcgaatcccaccgctgcca

SEQ ID NO: 153 - DNA, 73 bp, synthetic construct
  source 1..73: mol_type = other DNA
gcccggctagctcagtcggtagagcatgggactcttaatcccagggtcgtgggttcgagccccacgttgggcg

SEQ ID NO: 154 - DNA, 73 bp, synthetic construct
  source 1..73: mol_type = other DNA
gcccagctagctcagtcggtagagcataagactcttaatctcagggttgtggattcgtgccccatgctgggtg

SEQ ID NO: 155 - DNA, 74 bp, synthetic construct
  source 1..74: mol_type = other DNA
gcagctagctcagtcggtagagcatgagactcttaatctcagggtcatgggttcgtgccccatgttgggtgcca

SEQ ID NO: 156 - DNA, 73 bp, synthetic construct
  source 1..73: mol_type = other DNA
gcccggctagctcagtcggtagagcatgagactcttaatctcagggtcgtgggttcgagccccacgttgggcg

SEQ ID NO: 157 - DNA, 73 bp, synthetic construct
  source 1..73: mol_type = other DNA
gcccggctagctcagtcggtagagcatgagacccttaatctcagggtcgtgggttcgagccccacgttgggcg

SEQ ID NO: 158 - DNA, 73 bp, synthetic construct
  source 1..73: mol_type = other DNA
gcccggctagctcagtcggtagagcatgggactcttaatctcagggtcgtgggttcgagccccacgttgggcg

SEQ ID NO: 159 - DNA, 73 bp, synthetic construct
  source 1..73: mol_type = other DNA
gcccggctagctcagtcgatagagcatgagactcttaatctcagggtcgtgggttcgagccgcacgttgggcg

SEQ ID NO: 160 - DNA, 73 bp, synthetic construct
  source 1..73: mol_type = other DNA
gcccagctagctcagtcggtagagcatgagactcttaatctcagggtcatgggtttgagccccacgtttggtg

SEQ ID NO: 161 - DNA, 73 bp, synthetic construct
  source 1..73: mol_type = other DNA
gcctggctagctcagtcggcaaagcatgagactcttaatctcagggtcgtgggctcgagctccatgttgggcg

SEQ ID NO: 162 - DNA, 73 bp, synthetic construct
  source 1..73: mol_type = other DNA
gcccgactacctcagtcggtggagcatgggactcttcatcccagggttgtgggttcgagccccacattgggca

SEQ ID NO: 163 - DNA, 73 bp, synthetic construct
  source 1..73: mol_type = other DNA
gcctggatagctcagttggtagagcatcagacttttaatctgagggtccagggttcaagtccctgttcaggca

SEQ ID NO: 164 - DNA, 73 bp, synthetic construct
  source 1..73: mol_type = other DNA
acccagatagctcagtcagtagagcatcagacttttaatctgagggtccaaggttcatgtccctttttgggtg

SEQ ID NO: 165 - DNA, 73 bp, synthetic construct
  source 1..73: mol_type = other DNA
gcctggatagctcagttggtagagcatcagacttttaatctgagggtccagggttcaagtccctgttcaggcg

SEQ ID NO: 166 - DNA, 73 bp, synthetic construct
  source 1..73: mol_type = other DNA
gcccggatagctcagtcggtagagcatcagacttttaatctgagggtccagggttcaagtccctgttcgggcg

SEQ ID NO: 167 - DNA, 73 bp, synthetic construct
  source 1..73: mol_type = other DNA
gcctggatagctcagtcggtagagcatcagacttttaatctgagggtccagggttcaagtccctgttcaggcg

SEQ ID NO: 168 - DNA, 73 bp, synthetic construct
  source 1..73: mol_type = other DNA
gcccggatagctcagtcggtagagcatcagacttttaatctgagggtccggggttcaagtccctgttcgggcg

SEQ ID NO: 169 - DNA, 73 bp, synthetic construct
  source 1..73: mol_type = other DNA
gcctgggtagctcagtcggtagagcatcagacttttaatctgagggtccagggttcaagtccctgtccaggcg

SEQ ID NO: 170 - DNA, 73 bp, synthetic construct
  source 1..73: mol_type = other DNA
gcctggatagctcagttggtagaacatcagacttttaatctgacggtgcagggttcaagtccctgttcaggcg

SEQ ID NO: 171 - DNA, 73 bp, synthetic construct
  source 1..73: mol_type = other DNA
gcctcgttagcgcagtaggtagcgcgtcagtctcataatctgaaggtcgtgagttcgatcctcacacggggca

SEQ ID NO: 172 - DNA, 73 bp, synthetic construct
  source 1..73: mol_type = other DNA
gccctcttagcgcagtgggcagcgcgtcagtctcataatctgaaggtcctgagttcgagcctcagagagggca

SEQ ID NO: 173 - DNA, 73 bp, synthetic construct
  source 1..73: mol_type = other DNA
gcctccttagcgcagtaggcagcgcgtcagtctcataatctgaaggtcctgagttcgaacctcagagggggca

SEQ ID NO: 174 - DNA, 73 bp, synthetic construct
  source 1..73: mol_type = other DNA
gccctcttagcgcagcgggcagcgcgtcagtctcataatctgaaggtcctgagttcgagcctcagagagggca

SEQ ID NO: 175 - DNA, 73 bp, synthetic construct
  source 1..73: mol_type = other DNA
gccctcttagcgcagctggcagcgcgtcagtctcataatctgaaggtcctgagttcaagcctcagagagggca

SEQ ID NO: 176 - DNA, 73 bp, synthetic construct
  source 1..73: mol_type = other DNA
gcctcgttagcgcagtaggcagcgcgtcagtctcataatctgaaggtcgtgagttcgagcctcacacggggca

SEQ ID NO: 177 - DNA, 73 bp, synthetic construct
  source 1..73: mol_type = other DNA
gccctcttagtgcagctggcagcgcgtcagtttcataatctgaaagtcctgagttcaagcctcagagagggca

SEQ ID NO: 178 - DNA, 73 bp, synthetic construct
  source 1..73: mol_type = other DNA
gccgaaatagctcagttgggagagcgttagactgaagatctaaaggtccctggttcgatcccgggtttcggca

SEQ ID NO: 179 - DNA, 73 bp, synthetic construct
  source 1..73: mol_type = other DNA
gccgaaatagctcagttgggagagcgttagactgaagatctaaaggtccctggttcaatcccgggtttcggca

SEQ ID NO: 180 - DNA, 73 bp, synthetic construct
  source 1..73: mol_type = other DNA
gccgagatagctcagttgggagagcgttagactgaagatctaaaggtccctggttcaatcccgggtttcggca

SEQ ID NO: 181 - DNA, 74 bp, synthetic construct
  source 1..74: mol_type = other DNA
gccgaaatagctcagttgggagagcgttagaccgaagatcttaaaggtccctggttcaatcccgggtttcggca

SEQ ID NO: 182 - DNA, 74 bp, synthetic construct
  source 1..74: mol_type = other DNA
gctgaaatagctcagttgggagagcgttagactgaagatcttaaagttccctggttcaaccctgggtttcagcc

SEQ ID NO: 183 - DNA, 72 bp, synthetic construct
  source 1..72: mol_type = other DNA
ggctcgttggtctaggggtatgattctcgcttaggatgcgagaggtcccgggttcaaatcccggacgagccc

SEQ ID NO: 184 - DNA, 72 bp, synthetic construct
  source 1..72: mol_type = other DNA
ggctcgttggtctaggggtatgattctcgcttagggtgcgagaggtcccgggttcaaatcccggacgagccc

SEQ ID NO: 185 - DNA, 72 bp, synthetic construct
  source 1..72: mol_type = other DNA
ggctcgttggtctaggggtatgattctcgcttcgggtgcgagaggtcccgggttcaaatcccggacgagccc

SEQ ID NO: 186 - DNA, 72 bp, synthetic construct
  source 1..72: mol_type = other DNA
ggctcgttggtctaggggtatgattctcgcttcgggtgtgagaggtcccgggttcaaatcccggacgagccc

SEQ ID NO: 187 - DNA, 72 bp, synthetic construct
  source 1..72: mol_type = other DNA
ggctcgttggtctagtggtatgattctcgctttgggtgcgagaggtcccgggttcaaatcccggacgagccc

SEQ ID NO: 188 - DNA, 72 bp, synthetic construct
  source 1..72: mol_type = other DNA
ggctcgttggtctaggggtatgattctcggtttgggtccgagaggtcccgggttcaaatcccggacgagccc

SEQ ID NO: 189 - DNA, 72 bp, synthetic construct
  source 1..72: mol_type = other DNA
ggctcgttggtctaggggtatgattctcgctttgggtgcgagaggtcccgggttcaaatcccggacgagccc

SEQ ID NO: 190 - DNA, 87 bp, synthetic construct
  source 1..87: mol_type = other DNA
gcccggatgatcctcagtggtctggggtgcaggcttcaaacctgtagctgtctagcgacagagtggttcaattccacctttcgggcg

SEQ ID NO: 191 - DNA, 84 bp, synthetic construct
  source 1..84: mol_type = other DNA
gctcggatgatcctcagtggtctggggtgcaggcttcaaacctgtagctgtctagtgacagagtggttcaattccacctttgta

SEQ ID NO: 192 - DNA, 82 bp, synthetic construct
  source 1..82: mol_type = other DNA
gtagtcgtggccgagtggttaaggcgatggactagaaatccattggggtttccccgcgcaggttcgaatcctgccgactacg

SEQ ID NO: 193 - DNA, 82 bp, synthetic construct
  source 1..82: mol_type = other DNA
gtagtcgtggccgagtggttaaggcgatggactagaaatccattggggtctccccgcgcaggttcgaatcctgccgactacg

SEQ ID NO: 194 - DNA, 82 bp, synthetic construct
  source 1..82: mol_type = other DNA
gtagtcgtggccgagtggttaaggcgatggactagaaatccattggggtttccccacgcaggttcgaatcctgccgactacg

SEQ ID NO: 195 - DNA, 82 bp, synthetic construct
  source 1..82: mol_type = other DNA
gtagtcgtggccgagtggttaaggtgatggactagaaacccattggggtctccccgcgcaggttcgaatcctgccgactacg

SEQ ID NO: 196 - DNA, 82 bp, synthetic construct
  source 1..82: mol_type = other DNA
gctgtgatggccgagtggttaaggcgttggactcgaaatccaatggggtctccccgcgcaggttcgaatcctgctcacagcg

SEQ ID NO: 197 - DNA, 82 bp, synthetic construct
  source 1..82: mol_type = other DNA
gctgtgatggccgagtggttaaggcgttggactcgaaatccaatggggtctccccgcgcaggttcaaatcctgctcacagcg

SEQ ID NO: 198 - DNA, 82 bp, synthetic construct
  source 1..82: mol_type = other DNA
gctgtgatggccgagtggttaaggtgttggactcgaaatccaatgggggttccccgcgcaggttcaaatcctgctcacagcg

SEQ ID NO: 199 - DNA, 82 bp, synthetic construct
  source 1..82: mol_type = other DNA
gtcacggtggccgagtggttaaggcgttggactcgaaatccaatggggtttccccgcacaggttcgaatcctgttcgtgacg

SEQ ID NO: 200 - DNA, 82 bp, synthetic construct
  source 1..82: mol_type = other DNA
gacgaggtggccgagtggttaaggcgatggactgctaatccattgtgctctgcacgcgtgggttcgaatcccaccctcgtcg

SEQ ID NO: 201 - DNA, 82 bp, synthetic construct
  source 1..82: mol_type = other DNA
gacgaggtggccgagtggttaaggcgatggactgctaatccattgtgctctgcacgcgtgggttcgaatcccaccttcgtcg

SEQ ID NO: 202 - DNA, 82 bp, synthetic construct
  source 1..82: mol_type = other DNA
gacgaggtggccgagtggttaaggcgatggactgctaatccattgtgctttgcacgcgtgggttcgaatcccatcctcgtcg

SEQ ID NO: 203 - DNA, 82 bp, synthetic construct
  source 1..82: mol_type = other DNA
gacgaggtggccgagtggttaaggcgatggactgctaatccattgtgctctgcacgcgtgggttcgaatcccatcctcgtcg

SEQ ID NO: 204 - DNA, 82 bp, synthetic construct
  source 1..82: mol_type = other DNA
gacgaggtggccgagtggttaaggcgatggactgctaatccattgtgctctgcacacgtgggttcgaatcccatcctcgtcg

SEQ ID NO: 205 - DNA, 84 bp, synthetic construct
  source 1..84: mol_type = other DNA
ggagaggcctggccgagtggttaaggcgatggactgctaatccattgtgctctgcacgcgtgggttcgaatcccatcctcgtcg

SEQ ID NO: 206 - DNA, 82 bp, synthetic construct
  source 1..82: mol_type = other DNA
gcagcgatggccgagtggttaaggcgttggacttgaaatccaatggggtctccccgcgcaggttcgaaccctgctcgctgcg

SEQ ID NO: 207 - DNA, 82 bp, synthetic construct
  source 1..82: mol_type = other DNA
gtagtcgtggccgagtggttaaggcgatggacttgaaatccattggggtttccccgcgcaggttcgaatcctgccgactacg

SEQ ID NO: 208 - DNA, 82 bp, synthetic construct
  source 1..82: mol_type = other DNA
gtagtcgtggccgagtggttaaggcgatggacttgaaatccattggggtctccccgcgcaggttcgaatcctgccgactacg

SEQ ID NO: 209 - DNA, 82 bp, synthetic construct
  source 1..82: mol_type = other DNA
gtagtcgtggccgagtggttaaggcgatggacttgaaatccattggggtttccccgcgcaggttcgaatcctgtcggctacg

SEQ ID NO: 210 - DNA, 74 bp, synthetic construct
  source 1..74: mol_type = other DNA
ggcgccgtggcttagttggttaaagcgcctgtctagtaaacaggagatcctgggttcgaatcccagcggtgcct

SEQ ID NO: 211 - DNA, 74 bp, synthetic construct
  source 1..74: mol_type = other DNA
ggctccgtggcttagctggttaaagcgcctgtctagtaaacaggagatcctgggttcgaatcccagcggggcct

SEQ ID NO: 212 - DNA, 74 bp, synthetic construct
  source 1..74: mol_type = other DNA
ggctccgtagcttagttggttaaagcgcctgtctagtaaacaggagatcctgggttcgactcccagcggggcct

SEQ ID NO: 213 - DNA, 74 bp, synthetic construct
  source 1..74: mol_type = other DNA
ggcttcgtggcttagctggttaaagcgcctgtctagtaaacaggagatcctgggttcgaatcccagcgaggcct

SEQ ID NO: 214 - DNA, 74 bp, synthetic construct
  source 1..74: mol_type = other DNA
ggcgccgtggcttagctggttaaagcgcctgtctagtaaacaggagatcctgggttcgaatcccagcggtgcct

SEQ ID NO: 215 - DNA, 74 bp, synthetic construct
  source 1..74: mol_type = other DNA
ggccctgtggcttagctggtcaaagcgcctgtctagtaaacaggagatcctgggttcgaatcccagcggggcct

SEQ ID NO: 216 - DNA, 74 bp, synthetic construct
  source 1..74: mol_type = other DNA
ggctctatggcttagttggttaaagcgcctgtctcgtaaacaggagatcctgggttcgactcccagtggggcct

SEQ ID NO: 217 - DNA, 72 bp, synthetic construct
  source 1..72: mol_type = other DNA
ggcgcggtggccaagtggtaaggcgtcggtctcgtaaaccgaagatcacgggttcgaaccccgtccgtgcct

SEQ ID NO: 218 - DNA, 74 bp, synthetic construct
  source 1..74: mol_type = other DNA
ggctctgtggcttagttggctaaagcgcctgtctcgtaaacaggagatcctgggttcgaatcccagcggggcct

SEQ ID NO: 219 - DNA, 72 bp, synthetic construct
  source 1..72: mol_type = other DNA
ggcgcggtggccaagtggtaaggcgtcggtctcgtaaaccgaagatcgcgggttcgaaccccgtccgtgcct

SEQ ID NO: 220 - DNA, 74 bp, synthetic construct
  source 1..74: mol_type = other DNA
ggccctgtagctcagcggttggagcgctggtctcgtaaacctaggggtcgtgagttcaaatctcaccagggcct

SEQ ID NO: 221 - DNA, 74 bp, synthetic construct
  source 1..74: mol_type = other DNA
ggctctatggcttagttggttaaagcgcctgtcttgtaaacaggagatcctgggttcgaatcccagtagagcct

SEQ ID NO: 222 - DNA, 73 bp, synthetic construct
  source 1..73: mol_type = other DNA
ggctccatagctcagtggttagagcactggtcttgtaaaccaggggtcgcgagttcgatcctcgctggggcct

SEQ ID NO: 223 - DNA, 73 bp, synthetic construct
  source 1..73: mol_type = other DNA
ggctccatagctcaggggttagagcgctggtcttgtaaaccaggggtcgcgagttcaattctcgctggggcct

SEQ ID NO: 224 - DNA, 73 bp, synthetic construct
  source 1..73: mol_type = other DNA
ggctccatagctcaggggttagagcactggtcttgtaaaccaggggtcgcgagttcaaatctcgctggggcct

SEQ ID NO: 225 - DNA, 73 bp, synthetic construct
  source 1..73: mol_type = other DNA
ggccctatagctcaggggttagagcactggtcttgtaaaccaggggtcgcgagttcaaatctcgctggggcct

SEQ ID NO: 226 - DNA, 72 bp, synthetic construct
  source 1..72: mol_type = other DNA
ggctccatagctcaggggttagagcactggtcttgtaaaccagggtcgcgagttcaaatctcgctggggcct

SEQ ID NO: 227 - DNA, 72 bp, synthetic construct
  source 1..72: mol_type = other DNA
ggcctcgtggcgcaacggtagcgcgtctgactccagatcagaaggttgcgtgttcaaatcacgtcggggtca

SEQ ID NO: 228 - DNA, 72 bp, synthetic construct
  source 1..72: mol_type = other DNA
gacctcgtggcgcaatggtagcgcgtctgactccagatcagaaggttgcgtgttcaagtcacgtcggggtca

SEQ ID NO: 229 - DNA, 72 bp, synthetic construct
  source 1..72: mol_type = other DNA
gacctcgtggcgcaacggtagcgcgtctgactccagatcagaaggttgcgtgttcaaatcacgtcggggtca

SEQ ID NO: 230 - DNA, 72 bp, synthetic construct
  source 1..72: mol_type = other DNA
gacctcgtggcgcaacggtagcgcgtctgactccagatcagaaggctgcgtgttcgaatcacgtcggggtca

SEQ ID NO: 231 - DNA, 72 bp, synthetic construct
  source 1..72: mol_type = other DNA
gacctcgtggcgcaacggcagcgcgtctgactccagatcagaaggttgcgtgttcaaatcacgtcggggtca

SEQ ID NO: 232 - DNA, 93 bp, synthetic construct
  source 1..93: mol_type = other DNA
ccttcaatagttcagctggtagagcagaggactatagctacttcctcagtaggagacgtccttaggttgctggttcgattccagcttgaagga

SEQ ID NO: 233 - DNA, 91 bp, synthetic construct
  source 1..91: mol_type = other DNA
ccttcgatagctcagttggtagagcggaggactgtagttggctgtgtccttagacatccttaggtcgctggttcgaatccggctcgaagga

SEQ ID NO: 234 - DNA, 89 bp, synthetic construct
  source 1..89: mol_type = other DNA
ccttcgatagctcagttggtagagcggaggactgtagtggatagggcgtggcaatccttaggtcgctggttcgattccggctcgaagga

SEQ ID NO: 235 - DNA, 89 bp, synthetic construct
  source 1..89: mol_type = other DNA
ccttcgatagctcagttggtagagcggaggactgtaggctcattaagcaaggtatccttaggtcgctggttcgaatccggctcggagga

SEQ ID NO: 236 - DNA, 94 bp, synthetic construct
  source 1..94: mol_type = other DNA
ccttcgatagctcagctggtagagcggaggactgtagattgtatagacatttgcggacatccttaggtcgctggttcgattccagctcgaagga

SEQ ID NO: 237 - DNA, 93 bp, synthetic construct
  source 1..93: mol_type = other DNA
ccttcgatagctcagctggtagagcggaggactgtagctacttcctcagcaggagacatccttaggtcgctggttcgattccggctcgaagga

SEQ ID NO: 238 - DNA, 89 bp, synthetic construct
  source 1..89: mol_type = other DNA
ccttcgatagctcagctggtagagcggaggactgtaggcgcgcgcccgtggccatccttaggtcgctggttcgattccggctcgaagga

SEQ ID NO: 239 - DNA, 94 bp, synthetic construct
  source 1..94: mol_type = other DNA
ccttcgatagctcagctggtagagcggaggactgtagcctgtagaaacatttgtggacatccttaggtcgctggttcgattccggctcgaagga

SEQ ID NO: 240 - DNA, 94 bp, synthetic construct
  source 1..94: mol_type = other DNA
ccttcgatagctcagctggtagagcggaggactgtagattgtacagacatttgcggacatccttaggtcgctggttcgattccggctcgaagga

SEQ ID NO: 241 - DNA, 89 bp, synthetic construct
  source 1..89: mol_type = other DNA
ccttcgatagctcagctggtagagcggaggactgtagtacttaatgtgtggtcatccttaggtcgctggttcgattccggctcgaagga

SEQ ID NO: 242 - DNA, 89 bp, synthetic construct
  source 1..89: mol_type = other DNA
ccttcgatagctcagctggtagagcggaggactgtaggggtttgaatgtggtcatccttaggtcgctggttcgaatccggctcggagga

SEQ ID NO: 243 - DNA, 94 bp, synthetic construct
  source 1..94: mol_type = other DNA
ccttcgatagctcagctggtagagcggaggactgtagactgcggaaacgtttgtggacatccttaggtcgctggttcaattccggctcgaagga

SEQ ID NO: 244 - DNA, 90 bp, synthetic construct
  source 1..90: mol_type = other DNA
ctttcgatagctcagttggtagagcggaggactgtaggttcattaaactaaggcatccttaggtcgctggttcgaatccggctcgaagga

SEQ ID NO: 245 - DNA, 88 bp, synthetic construct
  source 1..88: mol_type = other DNA
tcttcaatagctcagctggtagagcggaggactgtaggtgcacgcccgtggccattcttaggtgctggtttgattccgacttggagag

SEQ ID NO: 246 - DNA, 73 bp, synthetic construct
  source 1..73: mol_type = other DNA
gtttccgtagtgtagtggttatcacgttcgcctaacacgcgaaaggtccccggttcgaaaccgggcggaaaca

SEQ ID NO: 247 - DNA, 73 bp, synthetic construct
  source 1..73: mol_type = other DNA
gtttccgtagtgtagtggtcatcacgttcgcctaacacgcgaaaggtccccggttcgaaaccgggcggaaaca

SEQ ID NO: 248 - DNA, 73 bp, synthetic construct
  source 1..73: mol_type = other DNA
gtttccgtagtgtagtggttatcacgttcgcctaacacgcgaaaggtccctggatcaaaaccaggcggaaaca

SEQ ID NO: 249 - DNA, 73 bp, synthetic construct
  source 1..73: mol_type = other DNA
gtttccgtagtgtagtggttatcacgttcgcctaacacgcgaaaggtccgcggttcgaaaccgggcggaaaca

SEQ ID NO: 250 - DNA, 73 bp, synthetic construct
  source 1..73: mol_type = other DNA
gtttccgtagtgtagtggttatcacgtttgcctaacacgcgaaaggtccccggttcgaaaccgggcagaaaca

SEQ ID NO: 251 - DNA, 72 bp, synthetic construct
  source 1..72: mol_type = other DNA
gggggtgtagctcagtggtagagcgtatgcttaacattcatgaggctctgggttcgatccccagcacttcca

SEQ ID NO: 252 - DNA, 73 bp, synthetic construct
  source 1..73: mol_type = other DNA
gtttccgtagtgtagtggttatcacgttcgcctcacacgcgaaaggtccccggttcgaaaccgggcggaaaca

SEQ ID NO: 253 - DNA, 73 bp, synthetic construct
  source 1..73: mol_type = other DNA
gcttctgtagtgtagtggttatcacgttcgcctcacacgcgaaaggtccccggttcgaaaccgggcagaagca

SEQ ID NO: 254 - DNA, 73 bp, synthetic construct
  source 1..73: mol_type = other DNA
gtttccgtagtgtagcggttatcacattcgcctcacacgcgaaaggtccccggttcgatcccgggcggaaaca

SEQ ID NO: 255 - DNA, 73 bp, synthetic construct
  source 1..73: mol_type = other DNA
gtttccgtagtgtagtggttatcacgttcgcctcacacgcgaaaggtccccggttcgaaactgggcggaaaca

SEQ ID NO: 256 - DNA, 74 bp, synthetic construct
  source 1..74: mol_type = other DNA
gtttccgtagtgtagtggttatcacgttcgcctcacacgcgtaaaggtccccggttcgaaaccgggcggaaaca

SEQ ID NO: 257 - DNA, 73 bp, synthetic construct
  source 1..73: mol_type = other DNA
gtttccgtagtggagtggttatcacgttcgcctcacacgcgaaaggtccccggtttgaaaccaggcggaaaca

SEQ ID NO: 258 - DNA, 73 bp, synthetic construct
  source 1..73: mol_type = other DNA
ggttccatagtgtagtggttatcacgtctgctttacacgcagaaggtcctgggttcgagccccagtggaacca

SEQ ID NO: 259 - DNA, 73 bp, synthetic construct
  source 1..73: mol_type = other DNA
ggttccatagtgtagcggttatcacgtctgctttacacgcagaaggtcctgggttcgagccccagtggaacca

SEQ ID NO: 260 - DNA, 73 bp, synthetic construct
  source 1..73: mol_type = other DNA
ggttccatagtgtagtggttatcacatctgctttacacgcagaaggtcctgggttcaagccccagtggaacca

SEQ ID NO: 261 - DNA, 73 bp, synthetic construct
  source 1..73: mol_type = other DNA
gtttccgtggtgtagtggttatcacattcgccttacacgcgaaaggtcctcgggtcgaaaccgagcggaaaca

SEQ ID NO: 262 - DNA, 72 bp, synthetic construct
  source 1..72: mol_type = other DNA
agcagagtggcgcagcggaagcgtgctgggcccataacccagaggtcgatggatcgaaaccatcctctgcta

SEQ ID NO: 263 - DNA, 72 bp, synthetic construct
  source 1..72: mol_type = other DNA
agcagagtggcgcagcggaagcgtgctgggcccataacccagaggtcgatggatctaaaccatcctctgcta

SEQ ID NO: 264 - DNA, 73 bp, synthetic construct
  source 1..73: mol_type = other DNA
tccctggtggtctagtggctaggattcggcgctttcaccgccgcggcccgggttcgattcccggtcagggaat

SEQ ID NO: 265 - DNA, 72 bp, synthetic construct
  source 1..72: mol_type = other DNA
gcgttggtggtttagtggtagaattctcgcctcccatgcgggagacccgggttcaattcccggccactgcac

SEQ ID NO: 266 - DNA, 72 bp, synthetic construct
  source 1..72: mol_type = other DNA
ggccttggtggtgcagtggtagaattctcgcctcccacgtgggagacccgggttcaattcccggccaatgca

SEQ ID NO: 267 - DNA, 73 bp, synthetic construct
  source 1..73: mol_type = other DNA
gtccctggtggtctagtggctaggattcggcgctttcaccgccgcggcccgggttcgattcccggccagggaa

SEQ ID NO: 268 - DNA, 75 bp, synthetic construct
  source 1..75: mol_type = other DNA
tgtctctgtggcgcaatcggttagcgcgttcggctgttaaccgaaagattggtggttcgagcccacccagggacg

SEQ ID NO: 269 - DNA, 86 bp, synthetic construct
  source 1..86: mol_type = other DNA
tggctccgtggcgcaatggatagcgcattggacttctagaggctgaaggcattcaaaggttccgggttcgagtcccggcggagtcg

SEQ ID NO: 270 - DNA, 74 bp, synthetic construct
  source 1..74: mol_type = other DNA
gcccggctagctcagtcggtagagcatgagactcttaatctcagggtcgtgggttcgagccccacgttgggcgc

SEQ ID NO: 271 - DNA, 73 bp, synthetic construct
  source 1..73: mol_type = other DNA
gccgtgatcgtatagtggttagtactctgcgttgtggccgcagcaacctcggttcgaatccgagtcacggcag

SEQ ID NO: 272 - DNA, 73 bp, synthetic construct
  source 1..73: mol_type = other DNA
gcgttggtggtatagtggtgagcatagctgccttccaagcagttgacccgggttcgattcccggccaacgcag

SEQ ID NO: 273 - DNA, 73 bp, synthetic construct
  source 1..73: mol_type = other DNA
tccctggtggtctagtggttaggattcggcgctctcaccgccgcggcccgggttcgattcccggtcagggaaa

SEQ ID NO: 274 - DNA, 73 bp, synthetic construct
  source 1..73: mol_type = other DNA
aggttccatggtgtaatggtgagcactctggactctgaatccagcgatccgagttcgagtctcggtggaacct

SEQ ID NO: 275 - DNA, 75 bp, synthetic construct
  source 1..75: mol_type = other DNA
tgtctctgtggcgtagtcggttagcgcgttcggctgttaaccgaaaagttggtggttcgagcccacccaggaacg

SEQ ID NO: 276 - DNA, 75 bp, synthetic construct
  source 1..75: mol_type = other DNA
tgtctctgtggcgcaatcggttagcgcgttcggctgttaaccgaaaggttggtggttcgagcccacccagggacg

SEQ ID NO: 277 - DNA, 75 bp, synthetic construct
  source 1..75: mol_type = other DNA
gtctctgtggcgcaatcggttagcgcattcggctgttaaccgaaaggttggtggttcgagcccacccagggacgc

SEQ ID NO: 278 - DNA, 75 bp, synthetic construct
  source 1..75: mol_type = other DNA
gtctctgtggcgcaatgggttagcgcgttcggctgttaaccgaaaggttggtggttcgagcccatccagggacgc

SEQ ID NO: 279 - DNA, 72 bp, synthetic construct
  source 1..72: mol_type = other DNA
gcactggtggttcagtggtagaattctcgcctcacacgcgggacacccgggttcaattcccggtcaaggcaa

SEQ ID NO: 280 - DNA, 74 bp, synthetic construct
  source 1..74: mol_type = other DNA
gtttccgtagtgtagtggttatcacgttcgcctcacacgcgaaaggtccccggttcgaaactgggcggaaacag

SEQ ID NO: 281 - DNA, 72 bp, synthetic construct
  source 1..72: mol_type = other DNA
gcactggtggttcagtggtagaattctcgcctcccacgcgggagacccgggtttaattcccggtcaagataa

SEQ ID NO: 282 - DNA, 75 bp, synthetic construct
  source 1..75: mol_type = other DNA
gtttccgtagtgtagtggttatcacgttcgcctcacacgcgtaaaggtccccggttcgaaaccgggcggaaacat

SEQ ID NO: 283 - DNA, 73 bp, synthetic construct
  source 1..73: mol_type = other DNA
tagcagagtggcgcagcggaagcgtgctgggcccataacccagaggtcgatggatcgaaaccatcctctgcta

SEQ ID NO: 284 - DNA, 74 bp, synthetic construct
  source 1..74: mol_type = other DNA
gtttccgtagtgtagtggttatcacgttcgcctcacacgcgaaaggtccccggttcgaaaccgggcggaaacaa

SEQ ID NO: 285 - DNA, 73 bp, synthetic construct
  source 1..73: mol_type = other DNA
tcctcgttagtatagtggtgagtatccccgcctgtcacgcgggagaccggggttcgattccccgacggggagg

SEQ ID NO: 286 - DNA, 72 bp, synthetic construct
  source 1..72: mol_type = other DNA
tgcatgggtggttcagtggtagaattctcgcctgccacgcgggaggcccgggttcgattcccggcccatgca

SEQ ID NO: 287 - DNA, 73 bp, synthetic construct
  source 1..73: mol_type = other DNA
tccctggtggtctagtggttaggattcggcgctctcaccgccgcggcccgggttcgattcccggtcagggaag

SEQ ID NO: 288 - DNA, 73 bp, synthetic construct
  source 1..73: mol_type = other DNA
atccttgttactatagtggtgagtatctctgcctgtcatgcgtgagagagggggtcgattccccgacggggag

SEQ ID NO: 289 - DNA, 72 bp, synthetic construct
  source 1..72: mol_type = other DNA
gcattggtggttcagtggtagaattctcgcctgccacgcgggaggcccgggttcgattcccggccaatgcac

SEQ ID NO: 290 - DNA, 84 bp, synthetic construct
  source 1..84: mol_type = other DNA
gtcaggatggccgagcggtctaaggcgctgcgttcaggtcgcagtctcccctggaggcgtgggttcgaatcccactcctgacaa

SEQ ID NO: 291 - DNA, 73 bp, synthetic construct
  source 1..73: mol_type = other DNA
cgcgttggtggtatagtggtgagcatagctgccttccaagcagttgacccgggttcgattcccggccaacgca

SEQ ID NO: 292 - DNA, 75 bp, synthetic construct
  source 1..75: mol_type = other DNA
cgtctctgtggcgcaatcggttagcgcgttcggctgttaaccgaaaggttggtggttcgatcccacccagggacg

SEQ ID NO: 293 - DNA, 73 bp, synthetic construct
  source 1..73: mol_type = other DNA
cgcgttggtggtgtagtggtgagcacagctgcctttcaagcagttaacgcgggttcgattcccgggtaacgaa

SEQ ID NO: 294 - DNA, 73 bp, synthetic construct
  source 1..73: mol_type = other DNA
cggctcgttggtctaggggtatgattctcgcttcgggtgcgagaggtcccgggttcaaatcccggacgagccc

SEQ ID NO: 295 - DNA, 73 bp, synthetic construct
  source 1..73: mol_type = other DNA
ggctcgttggtctaggggtatgattctcgcttagggtgcgagaggtcccgggttcaaatcccggacgagccct

SEQ ID NO: 296 - DNA, 74 bp, synthetic construct
  source 1..74: mol_type = other DNA
cgcccggatagctcagtcggtagagcatcagacttttaatctgagggtccagggttcaagtccctgttcgggcg

SEQ ID NO: 297 - DNA, 74 bp, synthetic construct
  source 1..74: mol_type = other DNA
gcccggatagctcagtcggtagagcatcagacttttaatctgagggtccagggttcaagtccctgttcgggcgt

SEQ ID NO: 298 - DNA, 107 bp, synthetic construct
  source 1..107: mol_type = other DNA
tgtcaggatggccgagtggtctaaggcgccagactcaaggtaagcaccttgcctgcgggctttctggtctccggatggaggcgtgggttcgaatcccacttctgaca

SEQ ID NO: 299 - DNA, 73 bp, synthetic construct
  source 1..73: mol_type = other DNA
ttccctggtggtctagtggttaggattcggcgctctcaccgccgcggcccgggttcgattcccggtcaggaaa

SEQ ID NO: 300 - DNA, 90 bp, synthetic construct
  source 1..90: mol_type = other DNA
gccttcgatagctcagttggtagagcggaggactgtagtggatagggcgtggcaatccttaggtcgctggttcgattccggctcgaagga

SEQ ID NO: 301 - DNA, 74 bp, synthetic construct
  source 1..74: mol_type = other DNA
cgggggattagctcaaatggtagagcgctcgcttagcatgcgagaggtagcgggatcgatgcccgcatcctcca

SEQ ID NO: 302 - DNA, 94 bp, synthetic construct
  source 1..94: mol_type = other DNA
agctccagtggcgcaatcggttagcgcgcggtacttatacagcagtacatgcagagcaatgccgaggttgtgagttcgagcctcacctggagca

SEQ ID NO: 303 - DNA, 72 bp, synthetic construct
  source 1..72: mol_type = other DNA
gcgccgctggtgtagtggtatcatgcaagattcccattcttgcgacccgggttcgattcccgggcggcgcat

SEQ ID NO: 304 - DNA, 73 bp, synthetic construct
  source 1..73: mol_type = other DNA
tcccatatggtctagcggttaggattcctggttttcacccaggtggcccgggttcgactcccggtatgggaac

SEQ ID NO: 305 - DNA, 73 bp, synthetic construct
  source 1..73: mol_type = other DNA
gggggatgtagctcagtggtagagcgcgcgcttcgcatgtgtgaggtcccgggttcaatccccggcatctcca

SEQ ID NO: 306 - DNA, 72 bp, synthetic construct
  source 1..72: mol_type = other DNA
gcattggtggttcagtggtagaattctcgcctgccacgcgggaggcccgggttcgattcccggccaatgcaa

SEQ ID NO: 307 - DNA, 74 bp, synthetic construct
  source 1..74: mol_type = other DNA
gggccagtggcgcaatggataacgcgtctgactacggatcagaagattctaggttcgactcctggctggctcgc

SEQ ID NO: 308 - DNA, 74 bp, synthetic construct
  source 1..74: mol_type = other DNA
ggtttccgtagtgtagtggttatcacgttcgcctaacacgcgaaaggtccccggttcgaaaccgggcggaaaca

SEQ ID NO: 309 - DNA, 74 bp, synthetic construct
  source 1..74: mol_type = other DNA
agtttccgtagtgtagtggttatcacgttcgcctaacacgcgaaaggtccccggttcgaaaccgggcggaaaca

SEQ ID NO: 310 - DNA, 83 bp, synthetic construct
  source 1..83: mol_type = other DNA
aggtagcgtggccgagcggtctaaggcgctggattaaggctccagtctcttcgggggcgtgggttcgaatcccaccgctgcca

SEQ ID NO: 311 - DNA, 74 bp, synthetic construct
  source 1..74: mol_type = other DNA
gtttccgtagtgtagtggtcatcacgttcgcctaacacgcgaaaggtccccggttcgaaaccgggcggaaacat

SEQ ID NO: 312 - DNA, 73 bp, synthetic construct
  source 1..73: mol_type = other DNA
ggctcgttggtctaggggtatgattctcgctttgggtgcgagaggtcccgggttcaaatcccggacgagccca

SEQ ID NO: 313 - DNA, 73 bp, synthetic construct
  source 1..73: mol_type = other DNA
ggctccatagctcaggggttagagcactggtcttgtaaaccagggtcgcgagttcaaatctcgctggggcctg

SEQ ID NO: 314 - DNA, 73 bp, synthetic construct
  source 1..73: mol_type = other DNA
tggggatgtagctcagtggtagagcgcatgctttgcatgtatgaggccccgggttcgatccccggcatctcca

SEQ ID NO: 315 - DNA, 74 bp, synthetic construct
  source 1..74: mol_type = other DNA
cgcccggctagctcagtcggtagagcatgagactcttaatctcagggtcgtgggttcgagccccacgttgggcg

SEQ ID NO: 316 - DNA, 74 bp, synthetic construct
  source 1..74: mol_type = other DNA
gtttccgtagtgtagtggttatcacgttcgcctaacacgcgaaaggtccccggttcgaaaccgggcggaaacaa

SEQ ID NO: 317 - DNA, 74 bp, synthetic construct
  source 1..74: mol_type = other DNA
gcccggctagctcagtcggtagagcatgagactcttaatctcagggtcgtgggttcgagccccacgttgggcgt

SEQ ID NO: 318 - DNA, 74 bp, synthetic construct
  source 1..74: mol_type = other DNA
gtttccgtagtgtagtggttatcacgttcgcctcacacgcgaaaggtccccggttcgaaaccgggcggaaacac

SEQ ID NO: 319 - DNA, 73 bp, synthetic construct
  source 1..73: mol_type = other DNA
cagcagagtggcgcagcggaagcgtgctgggcccataacccagaggtcgatggatcgaaaccatcctctgcta

SEQ ID NO: 320 - DNA, 85 bp, synthetic construct
  source 1..85: mol_type = other DNA
ggagaggcctggccgagtggttaaggcgatggactgctaatccattgtgctctgcacgcgtgggttcgaatcccatcctcgtcgc

SEQ ID NO: 321 - DNA, 73 bp, synthetic construct
  source 1..73: mol_type = other DNA
ggccccatggtgtaatggttagcactctggactttgaatccagcgatccgagttcaaatctcggtgggacctg

SEQ ID NO: 322 - DNA, 73 bp, synthetic construct
  source 1..73: mol_type = other DNA
ggccccatggtgtaatggttagcactctggactttgaatccagcgatccgagttcaaatctcggtgggaccta

SEQ ID NO: 323 - DNA, 83 bp, synthetic construct
  source 1..83: mol_type = other DNA
gtagtcgtggccgagtggttaaggcgatggacttgaaatccattggggtctccccgcgcaggttcgaatcctgccgactacgg

SEQ ID NO: 324 - DNA, 73 bp, synthetic construct
  source 1..73: mol_type = other DNA
agcagagtggcgcagcggaagcgtgctgggcccataacccagaggtcgatggatcgaaaccatcctctgctat

SEQ ID NO: 325 - DNA, 74 bp, synthetic construct
  source 1..74: mol_type = other DNA
ggaccacgtggcctaatggataaggcgtctgacttcggatcagaagattgagggttcgaatccctccgtggtta

SEQ ID NO: 326 - DNA, 83 bp, synthetic construct
  source 1..83: mol_type = other DNA
tgtagtcgtggccgagtggttaaggcgatggactagaaatccattggggtctccccgcgcaggttcgaatcctgccgactacg

SEQ ID NO: 327 - DNA, 73 bp, synthetic construct
  source 1..73: mol_type = other DNA
agcagagtggcgcagcggaagcgtgctgggcccataacccagaggtcgatggatcgaaaccatcctctgctag

SEQ ID NO: 328 - DNA, 84 bp, synthetic construct
  source 1..84: mol_type = other DNA
cgtcaggatggccgagcggtctaaggcgctgcgttcaggtcgcagtctcccctggaggcgtgggttcgaatcccactcctgaca

SEQ ID NO: 329 - DNA, 75 bp, synthetic construct
  source 1..75: mol_type = other DNA
ggctccgtggcttagctggttaaagcgcctgtctagtaaacaggagatcctgggttcgaatcccagcggggcctg

SEQ ID NO: 330 - DNA, 74 bp, synthetic construct
  source 1..74: mol_type = other DNA
agggccagtggcgcaatggataacgcgtctgactacggatcagaagattccaggttcgactcctggctggctcg

SEQ ID NO: 331 - DNA, 74 bp, synthetic construct
  source 1..74: mol_type = other DNA
ggtttccgtagtgtagtggttatcacgttcgcctcacacgcgaaaggtccccggttcgaaaccgggcggaaaca

SEQ ID NO: 332 - DNA, 73 bp, synthetic construct
  source 1..73: mol_type = other DNA
aggggatgtagctcagtggtagagcgcatgcttcgcatgtatgaggtcccgggttcgatccccggcatctcca

SEQ ID NO: 333 - DNA, 75 bp, synthetic construct
  source 1..75: mol_type = other DNA
tggccggttagctcagttggttagagcgtggtgctaataacgccaaggtcgcgggttcgatccccgtacgggcca

SEQ ID NO: 334 - DNA, 73 bp, synthetic construct
  source 1..73: mol_type = other DNA
cggctcgttggtctaggggtatgattctcgcttagggtgcgagaggtcccgggttcaaatcccggacgagccc

SEQ ID NO: 335 - DNA, 74 bp, synthetic construct
  source 1..74: mol_type = other DNA
agcccggctagctcagtcggtagagcatgagactcttaatctcagggtcgtgggttcgagccccacgttgggcg

SEQ ID NO: 336 - DNA, 92 bp, synthetic construct
  source 1..92: mol_type = other DNA
tccttcgatagctcagttggtagagcggaggactgtagttggctgtgtccttagacatccttaggtcgctggttcgaatccggctcgaagga

SEQ ID NO: 337 - DNA, 74 bp, synthetic construct
  source 1..74: mol_type = other DNA
ggggaattagctcaaatggtagagcgctcgcttagcatgcgagaggtagcgggatcgatgcccgcattctccag

SEQ ID NO: 338 - DNA, 74 bp, synthetic construct
  source 1..74: mol_type = other DNA
cgccctcttagcgcagcgggcagcgcgtcagtctcataatctgaaggtcctgagttcgagcctcagagagggca

SEQ ID NO: 339 - DNA, 95 bp, synthetic construct
  source 1..95: mol_type = other DNA
tgctccagtggcgcaatcggttagcgcgcggtacttatatggcagtatgtgtgcgagtgatgccgaggttgtgagttcgagcctcacctggagca

SEQ ID NO: 340 - DNA, 73 bp, synthetic construct
  source 1..73: mol_type = other DNA
tgccgtgatcgtatagtggttagtactctgcgttgtggccgcagcaacctcggttcgaatccgagtcacggca

SEQ ID NO: 341 - DNA, 75 bp, synthetic construct
  source 1..75: mol_type = other DNA
ggccggttagctcagttggttagagcgtggtgctaataacgccaaggtcgcgggttcgatccccgtacgggccac

SEQ ID NO: 342 - DNA, 74 bp, synthetic construct
  source 1..74: mol_type = other DNA
agtttccgtagtgtagtggttatcacgtttgcctaacacgcgaaaggtccccggttcgaaaccgggcagaaaca

SEQ ID NO: 343 - DNA, 74 bp, synthetic construct
  source 1..74: mol_type = other DNA
gcttctgtagtgtagtggttatcacgttcgcctcacacgcgaaaggtccccggttcgaaaccgggcagaagcaa

SEQ ID NO: 344 - DNA, 73 bp, synthetic construct
  source 1..73: mol_type = other DNA
ttcctcgttagtatagtggtgagtatccccgcctgtcacgcgggagaccggggttcgattccccgacggggag

SEQ ID NO: 345 - DNA, 83 bp, synthetic construct
  source 1..83: mol_type = other DNA
gtagtcgtggccgagtggttaaggcgatggacttgaaatccattggggtttccccgcgcaggttcgaatcctgtcggctacgg

SEQ ID NO: 346 - DNA, 73 bp, synthetic construct
  source 1..73: mol_type = other DNA
aggttccatggtgtaatggttagcactctggactctgaatccagcgatccgagttcaaatctcggtggaacct

SEQ ID NO: 347 - DNA, 73 bp, synthetic construct
  source 1..73: mol_type = other DNA
tcctcgttagtatagtggtgagtgtccccgtctgtcacgcgggagaccggggttcgattccccgacggggaga

SEQ ID NO: 348 - DNA, 74 bp, synthetic construct
  source 1..74: mol_type = other DNA
gtttccgtagtgtagtggttatcacgttcgcctaacacgcgaaaggtccctggatcaaaaccaggcggaaacaa

SEQ ID NO: 349 - DNA, 75 bp, synthetic construct
  source 1..75: mol_type = other DNA
cggccggttagctcagttggttagagcgtggtgctaataacgccaaggtcgcgggttcgatccccgtactggcca

SEQ ID NO: 350 - DNA, 73 bp, synthetic construct
  source 1..73: mol_type = other DNA
ggccccatggtgtaatggtcagcactctggactctgaatccagcgatccgagttcaaatctcggtgggaccca

SEQ ID NO: 351 - DNA, 73 bp, synthetic construct
  source 1..73: mol_type = other DNA
ggccccatggtgtaatggttagcactctggactttgaatccagcgatccgagttcaaatctcggtgggacctt

SEQ ID NO: 352 - DNA, 73 bp, synthetic construct
  source 1..73: mol_type = other DNA
tgggggtgtagctcagtggtagagcgcgtgcttagcatgtacgaggtcccgggttcaatccccggcacctcca

SEQ ID NO: 353 - DNA, 73 bp, synthetic construct
  source 1..73: mol_type = other DNA
ggggatgtagctcagtggtagagcgcatgcttagcatgcatgaggtcccgggttcgatccccagcatctccag

SEQ ID NO: 354 - DNA, 73 bp, synthetic construct
  source 1..73: mol_type = other DNA
agggggtgtagctcagtggtagagcgcgtgcttcgcatgtacgaggccccgggttcgacccccggctcctcca

SEQ ID NO: 355 - DNA, 73 bp, synthetic construct
  source 1..73: mol_type = other DNA
gggggtgtagctcagtggtagagcgcgtgcttagcatgcacgaggccccgggttcaatccccggcacctccat

SEQ ID NO: 356 - DNA, 73 bp, synthetic construct
  source 1..73: mol_type = other DNA
gggggtgtagctcagtggtagagcgcgtgcttagcatgcacgaggccccgggttcaatccccggcacctccag

SEQ ID NO: 357 - DNA, 107 bp, synthetic construct
  source 1..107: mol_type = other DNA
gtcaggatggccgagtggtctaaggcgccagactcaagctaagcttcctccgcggtggggattctggtctccaatggaggcgtgggttcgaatcccacttctgacac

SEQ ID NO: 358 - DNA, 106 bp, synthetic construct
  source 1..106: mol_type = other DNA
tgtcaggatggccgagtggtctaaggcgccagactcaagcttggcttcctcgtgttgaggattctggtctccaatggaggcgtgggttcgaatcccacttctgaca

SEQ ID NO: 359 - DNA, 73 bp, synthetic construct
  source 1..73: mol_type = other DNA
ggttccatggtgtaatggttagcactctggactctgaatccagcgatccgagttcaaatctcggtggaacctt

SEQ ID NO: 360 - DNA, 83 bp, synthetic construct
  source 1..83: mol_type = other DNA
ggtagcgtggccgagcggtctaaggcgctggattaaggctccagtctcttcgggggcgtgggttcgaatcccaccgctgccag

SEQ ID NO: 361 - DNA, 74 bp, synthetic construct
  source 1..74: mol_type = other DNA
tgcctccttagcgcagtaggcagcgcgtcagtctcataatctgaaggtcctgagttcgaacctcagagggggca

SEQ ID NO: 362 - DNA, 74 bp, synthetic construct
  source 1..74: mol_type = other DNA
agcccggatagctcagtcggtagagcatcagacttttaatctgagggtccagggttcaagtccctgttcgggcg

SEQ ID NO: 363 - DNA, 74 bp, synthetic construct
  source 1..74: mol_type = other DNA
gcctccttagcgcagtaggcagcgcgtcagtctcataatctgaaggtcctgagttcgaacctcagagggggcag

SEQ ID NO: 364 - DNA, 73 bp, synthetic construct
  source 1..73: mol_type = other DNA
ttccctggtggtctagtggttaggattcggcgctctcaccgccgcggcccgggttcgattcccggtcagggaa

SEQ ID NO: 365 - DNA, 84 bp, synthetic construct
  source 1..84: mol_type = other DNA
caccaggatggccgagtggttaaggcgttggacttaagatccaatggacatatgtccgcgtgggttcgaaccccactcctggta

SEQ ID NO: 366 - DNA, 73 bp, synthetic construct
  source 1..73: mol_type = other DNA
tggctcgttggtctaggggtatgattctcgcttagggtgcgagaggtcccgggttcaaatcccggacgagccc

SEQ ID NO: 367 - DNA, 74 bp, synthetic construct
  source 1..74: mol_type = other DNA
agccccagtggcctaatggataaggcattggcctcctaagccagggattgtgggttcgagtcccatctggggtg

SEQ ID NO: 368 - DNA, 73 bp, synthetic construct
  source 1..73: mol_type = other DNA
ggggatatagctcaggggtagagcatttgactgcagatcaagaggtccccggttcaaatccgggtgccccccc

SEQ ID NO: 369 - DNA, 94 bp, synthetic construct
  source 1..94: mol_type = other DNA
cccttcgatagctcagctggtagagcggaggactgtagctacttcctcagcaggagacatccttaggtcgctggttcgattccggctcgaagga

SEQ ID NO: 370 - DNA, 90 bp, synthetic construct
  source 1..90: mol_type = other DNA
cccttcgatagctcagctggtagagcggaggactgtaggcgcgcgcccgtggccatccttaggtcgctggttcgattccggctcgaagga

SEQ ID NO: 371 - DNA, 74 bp, synthetic construct
  source 1..74: mol_type = other DNA
tgggggattagctcaaatggtagagcgctcgcttagcatgcgagaggtagcgggatcgatgcccgcatcctcca

SEQ ID NO: 372 - DNA, 83 bp, synthetic construct
  source 1..83: mol_type = other DNA
gtagtcgtggccgagtggttaaggcgatggactagaaatccattggggtctccccgcgcaggttcgaatcctgccgactacgg

SEQ ID NO: 373 - DNA, 74 bp, synthetic construct
  source 1..74: mol_type = other DNA
gcctcgttagcgcagtaggtagcgcgtcagtctcataatctgaaggtcgtgagttcgatcctcacacggggcac

SEQ ID NO: 374 - DNA, 92 bp, synthetic construct
  source 1..92: mol_type = other DNA
ggctctgtggcgcaatggatagcgcattggacttctagctgagcctagtgtggtcattcaaaggttgtgggttcgagtcccaccagagtcga

SEQ ID NO: 375 - DNA, 75 bp, synthetic construct
  source 1..75: mol_type = other DNA
gtctctgtggcgcaatcggttagcgcgttcggctgttaaccgaaaggttggtggttcgagcccacccagggacgc

SEQ ID NO: 376 - DNA, 83 bp, synthetic construct
  source 1..83: mol_type = other DNA
ggcagcgatggccgagtggttaaggcgttggacttgaaatccaatggggtctccccgcgcaggttcgaaccctgctcgctgcg

SEQ ID NO: 377 - DNA, 74 bp, synthetic construct
  source 1..74: mol_type = other DNA
ggttccatagtgtagtggttatcacgtctgctttacacgcagaaggtcctgggttcgagccccagtggaaccat

SEQ ID NO: 378 - DNA, 74 bp, synthetic construct
  source 1..74: mol_type = other DNA
ggttccatagtgtagcggttatcacgtctgctttacacgcagaaggtcctgggttcgagccccagtggaaccac

SEQ ID NO: 379 - DNA, 87 bp, synthetic construct
  source 1..87: mol_type = other DNA
tggctctgtggcgcaatggatagcgcattggacttctagatagttagagaaattcaaaggttgtgggttcgagtcccaccagagtcg

SEQ ID NO: 380 - DNA, 84 bp, synthetic construct
  source 1..84: mol_type = other DNA
taccagaatggccgagtggttaaggcgttggacttaagatccaatggattcatatccgcgtgggttcgaaccccacttctggta

SEQ ID NO: 381 - DNA, 74 bp, synthetic construct
  source 1..74: mol_type = other DNA
ggcccggatagctcagtcggtagagcatcagacttttaatctgagggtccggggttcaagtccctgttcgggcg

SEQ ID NO: 382 - DNA, 74 bp, synthetic construct
  source 1..74: mol_type = other DNA
gccgaaatagctcagttgggagagcgttagactgaagatctaaaggtccctggttcgatcccgggtttcggcag

SEQ ID NO: 383 - DNA, 74 bp, synthetic construct
  source 1..74: mol_type = other DNA
gcccggatagctcagtcggtagagcatcagacttttaatctgagggtccagggttcaagtccctgttcgggcgg

SEQ ID NO: 384 - DNA, 74 bp, synthetic construct
  source 1..74: mol_type = other DNA
gccgaaatagctcagttgggagagcgttagactgaagatctaaaggtccctggttcaatcccgggtttcggcag

SEQ ID NO: 385 - DNA, 83 bp, synthetic construct
  source 1..83: mol_type = other DNA
ggacgaggtggccgagtggttaaggcgatggactgctaatccattgtgctttgcacgcgtgggttcgaatcccatcctcgtcg

SEQ ID NO: 386 - DNA, 73 bp, synthetic construct
  source 1..73: mol_type = other DNA
ggctcgttggtctaggggtatgattctcggtttgggtccgagaggtcccgggttcaaatcccggacgagcccc

SEQ ID NO: 387 - DNA, 83 bp, synthetic construct
  source 1..83: mol_type = other DNA
agtcacggtggccgagtggttaaggcgttggactcgaaatccaatggggtttccccgcacaggttcgaatcctgttcgtgacg

SEQ ID NO: 388 - DNA, 73 bp, synthetic construct
  source 1..73: mol_type = other DNA
ctcctcgttagtatagtggttagtatccccgcctgtcacgcgggagaccggggttcaattccccgacggggag

SEQ ID NO: 389 - DNA, 73 bp, synthetic construct
  source 1..73: mol_type = other DNA
ggacctcgtggcgcaacggtagcgcgtctgactccagatcagaaggctgcgtgttcgaatcacgtcggggtca

SEQ ID NO: 390 - DNA, 73 bp, synthetic construct
  source 1..73: mol_type = other DNA
ggggatgtagctcagtggtagagcgcatgctttgcatgtatgaggccccgggttcgatccccggcatctccat

SEQ ID NO: 391 - DNA, 74 bp, synthetic construct
  source 1..74: mol_type = other DNA
gccgaaatagctcagttgggagagcgttagactgaagatctaaaggtccctggttcgatcccgggtttcggcac

SEQ ID NO: 392 - DNA, 73 bp, synthetic construct
  source 1..73: mol_type = other DNA
aggggatgtagctcagtggtagagcgcatgctttgcacgtatgaggccccgggttcaatccccggcatctcca

SEQ ID NO: 393 - DNA, 75 bp, synthetic construct
  source 1..75: mol_type = other DNA
gtctctgtggcgcaatcggttagcgcgttcggctgttaaccgaaaggttggtggttcgagcccacccagggacgg

SEQ ID NO: 394 - DNA, 73 bp, synthetic construct
  source 1..73: mol_type = other DNA
tcccacatggtctagcggttaggattcctggttttcacccaggcggcccgggttcgactcccggtgtgggaac

SEQ ID NO: 395 - DNA, 74 bp, synthetic construct
  source 1..74: mol_type = other DNA
ggctccatagctcaggggttagagcgctggtcttgtaaaccaggggtcgcgagttcaattctcgctggggcctg

SEQ ID NO: 396 - DNA, 83 bp, synthetic construct
  source 1..83: mol_type = other DNA
tggtagtgtggccgagcggtctaaggcgctggatttaggctccagtctcttcgggggcgtgggttcgaatcccaccactgcca

SEQ ID NO: 397 - DNA, 74 bp, synthetic construct
  source 1..74: mol_type = other DNA
ggctccatagctcaggggttagagcactggtcttgtaaaccaggggtcgcgagttcaaatctcgctggggcctc

SEQ ID NO: 398 - DNA, 73 bp, synthetic construct
  source 1..73: mol_type = other DNA
tggctcgttggtctagtggtatgattctcgctttgggtgcgagaggtcccgggttcaaatcccggacgagccc

SEQ ID NO: 399 - DNA, 95 bp, synthetic construct
  source 1..95: mol_type = other DNA
ccttcgatagctcagctggtagagcggaggactgtagattgtacagacatttgcggacatccttaggtcgctggttcgattccggctcgaaggaa

SEQ ID NO: 400 - DNA, 74 bp, synthetic construct
  source 1..74: mol_type = other DNA
aggccctatagctcaggggttagagcactggtcttgtaaaccaggggtcgcgagttcaaatctcgctggggcct

SEQ ID NO: 401 - DNA, 90 bp, synthetic construct
  source 1..90: mol_type = other DNA
tccttcgatagctcagctggtagagcggaggactgtagtacttaatgtgtggtcatccttaggtcgctggttcgattccggctcgaagga

SEQ ID NO: 402 - DNA, 73 bp, synthetic construct
  source 1..73: mol_type = other DNA
tggctcgttggtctaggggtatgattctcgctttgggtgcgagaggtcccgggttcaaatcccggacgagccc

SEQ ID NO: 403 - DNA, 74 bp, synthetic construct
  source 1..74: mol_type = other DNA
gcccggctagctcagtcggtagagcatgggactcttaatcccagggtcgtgggttcgagccccacgttgggcgc

SEQ ID NO: 404 - DNA, 75 bp, synthetic construct
  source 1..75: mol_type = other DNA
cggccggttagctcagttggttagagcgtggtgctaataacgccaaggtcgcgggttcgatccccgtacgggcca

SEQ ID NO: 405 - DNA, 73 bp, synthetic construct
  source 1..73: mol_type = other DNA
tcccacatggtctagcggttaggattcctggttttcacccaggcggcccgggttcgactcccggtgtgggaat

SEQ ID NO: 406 - DNA, 83 bp, synthetic construct
  source 1..83: mol_type = other DNA
gacgaggtggccgagtggttaaggcgatggactgctaatccattgtgctctgcacgcgtgggttcgaatcccatcctcgtcga

SEQ ID NO: 407 - DNA, 73 bp, synthetic construct
  source 1..73: mol_type = other DNA
gccgtgatcgtatagtggttagtactctgcgttgtggccgcagcaacctcggttcgaatccgagtcacggcat

SEQ ID NO: 408 - DNA, 73 bp, synthetic construct
  source 1..73: mol_type = other DNA
cgccgtgatcgtatagtggttagtactctgcgttgtggccgcagcaacctcggttcgaatccgagtcacggca

SEQ ID NO: 409 - DNA, 73 bp, synthetic construct
  source 1..73: mol_type = other DNA
ggttccatggtgtaatggttagcactctggactctgaatccagcgatccgagttcaaatctcggtggaacctg

SEQ ID NO: 410 - DNA, 74 bp, synthetic construct
  source 1..74: mol_type = other DNA
tgcccggctagctcagtcggtagagcatgggactcttaatcccagggtcgtgggttcgagccccacgttgggcg

SEQ ID NO: 411 - DNA, 74 bp, synthetic construct
  source 1..74: mol_type = other DNA
gggccgcgtggcctaatggataaggcgtctgacttcggatcagaagattgcaggttcgagtcctgccgcggtcg

SEQ ID NO: 412 - DNA, 72 bp, synthetic construct
  source 1..72: mol_type = other DNA
gcgccgctggtgtagtggtatcatgcaagattcccattcttgcgacccgggttcgattcccgggcggcgcac

SEQ ID NO: 413 - DNA, 74 bp, synthetic construct
  source 1..74: mol_type = other DNA
gggccgcgtggcctaatggataaggcgtctgattccggatcagaagattgagggttcgagtcccttcgtggtcg

SEQ ID NO: 414 - DNA, 74 bp, synthetic construct
  source 1..74: mol_type = other DNA
cgccccggtggcctaatggataaggcattggcctcctaagccagggattgtgggttcgagtcccacccggggta

SEQ ID NO: 415 - DNA, 74 bp, synthetic construct
  source 1..74: mol_type = other DNA
gcccggctagctcagtcggtagagcatgagacccttaatctcagggtcgtgggttcgagccccacgttgggcgt

SEQ ID NO: 416 - DNA, 73 bp, synthetic construct
  source 1..73: mol_type = other DNA
aggcgcggtggccaagtggtaaggcgtcggtctcgtaaaccgaagatcacgggttcgaaccccgtccgtgcct

SEQ ID NO: 417 - DNA, 83 bp, synthetic construct
  source 1..83: mol_type = other DNA
ggtagcgtggccgagtggtctaaggcgctggatttaggctccagtcatttcgatggcgtgggttcgaatcccaccgctgccac

SEQ ID NO: 418 - DNA, 83 bp, synthetic construct
  source 1..83: mol_type = other DNA
gggtagcgtggccgagcggtctaaggcgctggattaaggctccagtctcttcgggggcgtgggttcgaatcccaccgctgcca

SEQ ID NO: 419 - DNA, 84 bp, synthetic construct
  source 1..84: mol_type = other DNA
agtcaggatggccgagcggtctaaggcgctgcgttcaggtcgcagtctcccctggaggcgtgggttcgaatcccacttctgaca

SEQ ID NO: 420 - DNA, 84 bp, synthetic construct
  source 1..84: mol_type = other DNA
gtcaggatggccgagcggtctaaggcgctgcgttcaggtcgcagtctcccctggaggcgtgggttcgaatcccacttctgacag

SEQ ID NO: 421 - DNA, 74 bp, synthetic construct
  source 1..74: mol_type = other DNA
gcctcgttagcgcagtaggcagcgcgtcagtctcataatctgaaggtcgtgagttcgagcctcacacggggcag

SEQ ID NO: 422 - DNA, 83 bp, synthetic construct
  source 1..83: mol_type = other DNA
ggtagcgtggccgagcggtctaaggcgctggatttaggctccagtctcttcggaggcgtgggttcgaatcccaccgctgccag

SEQ ID NO: 423 - DNA, 89 bp, synthetic construct
  source 1..89: mol_type = other DNA
tggctctgtggcgcaatggatagcgcattggacttctagtgacgaatagagcaattcaaaggttgtgggttcgaatcccaccagagtcg

SEQ ID NO: 424 - DNA, 72 bp, synthetic construct
  source 1..72: mol_type = other DNA
cgcattggtggttcagtggtagaattctcgcctgccacgcgggaggcccgggttcgattcccggccaatgca

SEQ ID NO: 425 - DNA, 83 bp, synthetic construct
  source 1..83: mol_type = other DNA
gctgtgatggccgagtggttaaggcgttggactcgaaatccaatggggtctccccgcgcaggttcgaatcctgctcacagcgt

SEQ ID NO: 426 - DNA, 75 bp, synthetic construct
  source 1..75: mol_type = other DNA
ggcgccgtggcttagctggttaaagcgcctgtctagtaaacaggagatcctgggttcgaatcccagcggtgcctg

SEQ ID NO: 427 - DNA, 73 bp, synthetic construct
  source 1..73: mol_type = other DNA
cgacctcgtggcgcaacggtagcgcgtctgactccagatcagaaggttgcgtgttcaaatcacgtcggggtca

SEQ ID NO: 428 - DNA, 83 bp, synthetic construct
  source 1..83: mol_type = other DNA
agacgaggtggccgagtggttaaggcgatggactgctaatccattgtgctctgcacgcgtgggttcgaatcccatcctcgtcg

SEQ ID NO: 429 - DNA, 75 bp, synthetic construct
  source 1..75: mol_type = other DNA
cggcgccgtggcttagttggttaaagcgcctgtctagtaaacaggagatcctgggttcgaatcccagcggtgcct

SEQ ID NO: 430 - DNA, 73 bp, synthetic construct
  source 1..73: mol_type = other DNA
ggcctcgtggcgcaacggtagcgcgtctgactccagatcagaaggttgcgtgttcaaatcacgtcggggtcaa

SEQ ID NO: 431 - DNA, 73 bp, synthetic construct
  source 1..73: mol_type = other DNA
agcgttggtggtatagtggtaagcatagctgccttccaagcagttgacccgggttcgattcccggccaacgca

SEQ ID NO: 432 - DNA, 73 bp, synthetic construct
  source 1..73: mol_type = other DNA
tcctcgttagtatagtggtgagtatccccgcctgtcacgcgggagaccggggttcgattccccgacggggaga

SEQ ID NO: 433 - DNA, 73 bp, synthetic construct
  source 1..73: mol_type = other DNA
ggctcgttggtctaggggtatgattctcgcttcgggtgcgagaggtcccgggttcaaatcccggacgagccct

SEQ ID NO: 434 - DNA, 75 bp, synthetic construct
  source 1..75: mol_type = other DNA
ggcgccgtggcttagttggttaaagcgcctgtctagtaaacaggagatcctgggttcgaatcccagcggtgcctt

SEQ ID NO: 435 - DNA, 83 bp, synthetic construct
  source 1..83: mol_type = other DNA
gtagtcgtggccgagtggttaaggcgatggactagaaatccattggggtctccccgcgcaggttcgaatcctgccgactacgt

SEQ ID NO: 436 - DNA, 73 bp, synthetic construct
  source 1..73: mol_type = other DNA
tgacctcgtggcgcaatggtagcgcgtctgactccagatcagaaggttgcgtgttcaagtcacgtcggggtca

SEQ ID NO: 437 - DNA, 73 bp, synthetic construct
  source 1..73: mol_type = other DNA
aggcgcggtggccaagtggtaaggcgtcggtctcgtaaaccgaagatcgcgggttcgaaccccgtccgtgcct

SEQ ID NO: 438 - DNA, 73 bp, synthetic construct
  source 1..73: mol_type = other DNA
agggggtatagctcagtggtagagcatttgactgcagatcaagaggtccccggttcaaatccgggtgccccct

SEQ ID NO: 439 - DNA, 73 bp, synthetic construct
  source 1..73: mol_type = other DNA
gggggtatagctcagtggtagagcatttgactgcagatcaagaggtccctggttcaaatccgggtgccccctc

SEQ ID NO: 440 - DNA, 73 bp, synthetic construct
  source 1..73: mol_type = other DNA
gggggtatagctcagtggtagagcatttgactgcagatcaagaggtccccggttcaaatccgggtgccccctc

SEQ ID NO: 441 - DNA, 73 bp, synthetic construct
  source 1..73: mol_type = other DNA
aggtcccatggtgtaatggttagcactctggactttgaatccagcgatccgagttcaaatctcggtgggacct

SEQ ID NO: 442 - DNA, 74 bp, synthetic construct
  source 1..74: mol_type = other DNA
gacccagtggcctaatggataaggcatcagcctccggagctggggattgtgggttcgagtcccatctgggtcgc

SEQ ID NO: 443 - DNA, 74 bp, synthetic construct
  source 1..74: mol_type = other DNA
agccccagtggcctaatggataaggcactggcctcctaagccagggattgtgggttcgagtcccacctggggta

SEQ ID NO: 444 - DNA, 74 bp, synthetic construct
  source 1..74: mol_type = other DNA
gccccagtggcctaatggataaggcactggcctcctaagccagggattgtgggttcgagtcccacctggggtgt

SEQ ID NO: 445 - DNA, 74 bp, synthetic construct
  source 1..74: mol_type = other DNA
agaccgcgtggcctaatggataaggcgtctgacttcggatcagaagattgagggttcgagtcccttcgtggtcg

SEQ ID NO: 446 - DNA, 75 bp, synthetic construct
  source 1..75: mol_type = other DNA
cgtctctgtggcgcaatcggttagcgcgttcggctgttaaccgaaaggttggtggttcgagcccacccagggacg

SEQ ID NO: 447 - DNA, 73 bp, synthetic construct
  source 1..73: mol_type = other DNA
ggcgttggtggtatagtggttagcatagctgccttccaagcagttgacccgggttcgattcccggccaacgca

SEQ ID NO: 448 - DNA, 74 bp, synthetic construct
  source 1..74: mol_type = other DNA
gtttccgtagtgtagcggttatcacattcgcctcacacgcgaaaggtccccggttcgatcccgggcggaaacag

SEQ ID NO: 449 - DNA, 75 bp, synthetic construct
  source 1..75: mol_type = other DNA
tggcgccgtggcttagttggttaaagcgcctgtctagtaaacaggagatcctgggttcgaatcccagcggtgcct

SEQ ID NO: 450 - DNA, 94 bp, synthetic construct
  source 1..94: mol_type = other DNA
gctccagtggcgcaatcggttagcgcgcggtacttatatgacagtgcgagcggagcaatgccgaggttgtgagttcgatcctcacctggagcac

SEQ ID NO: 451 - DNA, 72 bp, synthetic construct
  source 1..72: mol_type = other DNA
gcatgggtggttcagtggtagaattctcgcctgccacgcgggaggcccgggttcgattcccggcccatgcag

SEQ ID NO: 452 - DNA, 18 bp, synthetic construct
  source 1..18: mol_type = other DNA
aaaatataaatatatttc

SEQ ID NO: 453-454 - skipped (2 entries)

SEQ ID NO: 455 - DNA, 15 bp, synthetic construct
  source 1..15: mol_type = other DNA
aattcttcggaatgt

SEQ ID NO: 456-460 - skipped (5 entries)

SEQ ID NO: 461 - DNA, 20 bp, synthetic construct
  source 1..20: mol_type = other DNA
caggcgggttctgcccgcgc

SEQ ID NO: 462 - DNA, 18 bp, synthetic construct
  source 1..18: mol_type = other DNA
catacctgcaagggtatc

SEQ ID NO: 463 - DNA, 15 bp, synthetic construct
  source 1..15: mol_type = other DNA
cgaccgcaaggttgt

SEQ ID NO: 464 - DNA, 15 bp, synthetic construct
  source 1..15: mol_type = other DNA
cgaccttgcggtcat

SEQ ID NO: 465 - DNA, 18 bp, synthetic construct
  source 1..18: mol_type = other DNA
cgatgctaatcacatcgt

SEQ ID NO: 466 - DNA, 15 bp, synthetic construct
  source 1..15: mol_type = other DNA
cgatggtgacatcat

SEQ ID NO: 467 - DNA, 16 bp, synthetic construct
  source 1..16: mol_type = other DNA
cgatggtttacatcgt

SEQ ID NO: 468 - DNA, 13 bp, synthetic construct
  source 1..13: mol_type = other DNA
cgccgtaaggtgt

SEQ ID NO: 469 - DNA, 12 bp, synthetic construct
  source 1..12: mol_type = other DNA
cgccttaggtgt

SEQ ID NO: 470 - DNA, 15 bp, synthetic construct
  source 1..15: mol_type = other DNA
cgcctttcgacgcgt

SEQ ID NO: 471 - DNA, 13 bp, synthetic construct
  source 1..13: mol_type = other DNA
cgcttcacggcgt

SEQ ID NO: 472 - DNA, 15 bp, synthetic construct
  source 1..15: mol_type = other DNA
cggcagcaatgctgt

SEQ ID NO: 473 - DNA, 13 bp, synthetic construct
  source 1..13: mol_type = other DNA
cggctccgccttc

SEQ ID NO: 474 - DNA, 16 bp, synthetic construct
  source 1..16: mol_type = other DNA
cgggtatcacagggtc

SEQ ID NO: 475 - DNA, 17 bp, synthetic construct
  source 1..17: mol_type = other DNA
cggtgcgcaagcgctgt

SEQ ID NO: 476 - DNA, 18 bp, synthetic construct
  source 1..18: mol_type = other DNA
cgtacgggtgaccgtacc

SEQ ID NO: 477 - DNA, 13 bp, synthetic construct
  source 1..13: mol_type = other DNA
cgtcaaagacttc

SEQ ID NO: 478 - DNA, 13 bp, synthetic construct
  source 1..13: mol_type = other DNA
cgtcgtaagactt

SEQ ID NO: 479 - DNA, 14 bp, synthetic construct
  source 1..14: mol_type = other DNA
cgttgaataaacgt

SEQ ID NO: 480-485 - skipped (6 entries)

SEQ ID NO: 486 - DNA, 19 bp, synthetic construct
  source 1..19: mol_type = other DNA
taactagatactttcagat

SEQ ID NO: 487 - DNA, 15 bp, synthetic construct
  source 1..15: mol_type = other DNA
tactcgtatgggtgc

SEQ ID NO: 488 - DNA, 13 bp, synthetic construct
  source 1..13: mol_type = other DNA
tactttgcggtgt

SEQ ID NO: 489 - DNA, 19 bp, synthetic construct
  source 1..19: mol_type = other DNA
taggcgagtaacatcgtgc

SEQ ID NO: 490 - DNA, 19 bp, synthetic construct
  source 1..19: mol_type = other DNA
taggcgtgaatagcgcctc

SEQ ID NO: 491 - DNA, 19 bp, synthetic construct
  source 1..19: mol_type = other DNA
taggtcgcgagagcggcgc

SEQ ID NO: 492 - DNA, 19 bp, synthetic construct
  source 1..19: mol_type = other DNA
taggtcgcgtaagcggcgc

SEQ ID NO: 493 - DNA, 17 bp, synthetic construct
  source 1..17: mol_type = other DNA
taggtggttatccacgc

SEQ ID NO: 494-495 - skipped (2 entries)

SEQ ID NO: 496 - DNA, 18 bp, synthetic construct
  source 1..18: mol_type = other DNA
tatacgtgaaagcgtatc

SEQ ID NO: 497 - DNA, 21 bp, synthetic construct
  source 1..21: mol_type = other DNA
tatagggtcaaaaactctatc

SEQ ID NO: 498 - DNA, 20 bp, synthetic construct
  source 1..20: mol_type = other DNA
tatgcagaaatacctgcatc

SEQ ID NO: 499 - DNA, 15 bp, synthetic construct
  source 1..15: mol_type = other DNA
tccccatacgggggc

SEQ ID NO: 500 - DNA, 14 bp, synthetic construct
  source 1..14: mol_type = other DNA
tcccgaaggggttc

SEQ ID NO: 501 - DNA, 15 bp, synthetic construct
  source 1..15: mol_type = other DNA
tctacgtatgtgggc

SEQ ID NO: 502 - DNA, 14 bp, synthetic construct
  source 1..14: mol_type = other DNA
tctcataggagttc

SEQ ID NO: 503 - DNA, 14 bp, synthetic construct
  source 1..14: mol_type = other DNA
tctcctctggaggc

SEQ ID NO: 504 - DNA, 15 bp, synthetic construct
  source 1..15: mol_type = other DNA
tcttagcaataaggt

SEQ ID NO: 505 - DNA, 14 bp, synthetic construct
  source 1..14: mol_type = other DNA
tcttgtaggagttc

SEQ ID NO: 506 - DNA, 15 bp, synthetic construct
  source 1..15: mol_type = other DNA
tgaacgtaagttcgc

SEQ ID NO: 507 - DNA, 16 bp, synthetic construct
  source 1..16: mol_type = other DNA
tgaactgcgaggttcc

SEQ ID NO: 508 - skipped

SEQ ID NO: 509 - DNA, 15 bp, synthetic construct
  source 1..15: mol_type = other DNA
tgaccgaaaggtcgt

SEQ ID NO: 510 - DNA, 15 bp, synthetic construct
  source 1..15: mol_type = other DNA
tgaccgcaaggtcgt

SEQ ID NO: 511 - DNA, 14 bp, synthetic construct
  source 1..14: mol_type = other DNA
tgagctctgctctc

SEQ ID NO: 512 - DNA, 18 bp, synthetic construct
  source 1..18: mol_type = other DNA
tgaggcctcacggcctac

SEQ ID NO: 513 - DNA, 15 bp, synthetic construct
  source 1..15: mol_type = other DNA
tgagggcaacttcgt

SEQ ID NO: 514 - DNA, 16 bp, synthetic construct
  source 1..16: mol_type = other DNA
tgagggtcatacctcc

SEQ ID NO: 515 - DNA, 18 bp, synthetic construct
  source 1..18: mol_type = other DNA
tgagggtgcaaatcctcc

SEQ ID NO: 516 - DNA, 13 bp, synthetic construct
  source 1..13: mol_type = other DNA
tgccgaaaggcgt

SEQ ID NO: 517 - DNA, 13 bp, synthetic construct
  source 1..13: mol_type = other DNA
tgccgtaaggcgt

SEQ ID NO: 518 - DNA, 14 bp, synthetic construct
  source 1..14: mol_type = other DNA
tgcggtctccgcgc

SEQ ID NO: 519 - DNA, 11 bp, synthetic construct
  source 1..11: mol_type = other DNA
tgctagagcat

SEQ ID NO: 520 - DNA, 16 bp, synthetic construct
  source 1..16: mol_type = other DNA
tgctcgtatagagctc

SEQ ID NO: 521 - DNA, 15 bp, synthetic construct
  source 1..15: mol_type = other DNA
tggacaattgtctgc

SEQ ID NO: 522 - DNA, 15 bp, synthetic construct
  source 1..15: mol_type = other DNA
tggacagatgtccgt

SEQ ID NO: 523 - DNA, 15 bp, synthetic construct
  source 1..15: mol_type = other DNA
tggacaggtgtccgc

SEQ ID NO: 524 - DNA, 15 bp, synthetic construct
  source 1..15: mol_type = other DNA
tggacggttgtccgc

SEQ ID NO: 525 - DNA, 13 bp, synthetic construct
  source 1..13: mol_type = other DNA
tggacttgtggtc

SEQ ID NO: 526 - DNA, 16 bp, synthetic construct
  source 1..16: mol_type = other DNA
tggagattctctccgc

SEQ ID NO: 527 - DNA, 14 bp, synthetic construct
  source 1..14: mol_type = other DNA
tggcataggcctgc

SEQ ID NO: 528 - DNA, 14 bp, synthetic construct
  source 1..14: mol_type = other DNA
tggcttatgtctac

SEQ ID NO: 529 - DNA, 16 bp, synthetic construct
  source 1..16: mol_type = other DNA
tgggagttaatcccgt

SEQ ID NO: 530 - DNA, 14 bp, synthetic construct
  source 1..14: mol_type = other DNA
tgggatcttcccgc

SEQ ID NO: 531 - DNA, 16 bp, synthetic construct
  source 1..16: mol_type = other DNA
tgggcagaaatgtctc

SEQ ID NO: 532 - DNA, 15 bp, synthetic construct
  source 1..15: mol_type = other DNA
tgggcgttcgcccgc

SEQ ID NO: 533 - DNA, 14 bp, synthetic construct
  source 1..14: mol_type = other DNA
tgggcttcgcccgc

SEQ ID NO: 534 - DNA, 16 bp, synthetic construct
  source 1..16: mol_type = other DNA
tgggggataaccccgt

SEQ ID NO: 535 - DNA, 15 bp, synthetic construct
  source 1..15: mol_type = other DNA
tgggggtttccccgt

SEQ ID NO: 536 - skipped

SEQ ID NO: 537 - DNA, 15 bp, synthetic construct
  source 1..15: mol_type = other DNA
tggtggcaacaccgt

SEQ ID NO: 538 - DNA, 14 bp, synthetic construct
  source 1..14: mol_type = other DNA
tggtttatagccgt

SEQ ID NO: 539 - DNA, 19 bp, synthetic construct
  source 1..19: mol_type = other DNA
tgtacggtaataccgtacc

SEQ ID NO: 540 - DNA, 15 bp, synthetic construct
  source 1..15: mol_type = other DNA
tgtccgcaaggacgt

SEQ ID NO: 541 - DNA, 15 bp, synthetic construct
  source 1..15: mol_type = other DNA
tgtcctaacggacgt

SEQ ID NO: 542 - DNA, 18 bp, synthetic construct
  source 1..18: mol_type = other DNA
tgtcctattaacggacgt

SEQ ID NO: 543 - DNA, 16 bp, synthetic construct
  source 1..16: mol_type = other DNA
tgtccttcacgggcgt

SEQ ID NO: 544 - DNA, 13 bp, synthetic construct
  source 1..13: mol_type = other DNA
tgtcttaggacgt

SEQ ID NO: 545 - DNA, 18 bp, synthetic construct
  source 1..18: mol_type = other DNA
tgtgcgttaacgcgtacc

SEQ ID NO: 546 - DNA, 16 bp, synthetic construct
  source 1..16: mol_type = other DNA
tgtgtcgcaaggcacc

SEQ ID NO: 547 - DNA, 15 bp, synthetic construct
  source 1..15: mol_type = other DNA
tgttcgtaaggactt

SEQ ID NO: 548 - DNA, 16 bp, synthetic construct
  source 1..16: mol_type = other DNA
ttcacagaaatgtgtc

SEQ ID NO: 549 - DNA, 14 bp, synthetic construct
  source 1..14: mol_type = other DNA
ttccctcgtggagt

SEQ ID NO: 550 - DNA, 14 bp, synthetic construct
  source 1..14: mol_type = other DNA
ttccctctgggagc

SEQ ID NO: 551 - DNA, 14 bp, synthetic construct
  source 1..14: mol_type = other DNA
ttcccttgtggatc

SEQ ID NO: 552 - DNA, 13 bp, synthetic construct
  source 1..13: mol_type = other DNA
ttccttcgggagc

SEQ ID NO: 553 - DNA, 15 bp, synthetic construct
  source 1..15: mol_type = other DNA
ttctagcaatagagt

SEQ ID NO: 554 - DNA, 16 bp, synthetic construct
  source 1..16: mol_type = other DNA
ttctccactggggagc

SEQ ID NO: 555 - DNA, 15 bp, synthetic construct
  source 1..15: mol_type = other DNA
ttctcgagagggagc

SEQ ID NO: 556 - DNA, 15 bp, synthetic construct
  source 1..15: mol_type = other DNA
ttctcgtatgagagc

SEQ ID NO: 557 - DNA, 19 bp, synthetic construct
  source 1..19: mol_type = other DNA
tttaaggttttcccttaac

SEQ ID NO: 558 - DNA, 14 bp, synthetic construct
  source 1..14: mol_type = other DNA
tttcattgtggagt

SEQ ID NO: 559 - DNA, 14 bp, synthetic construct
  source 1..14: mol_type = other DNA
tttcgaaggaatcc

SEQ ID NO: 560 - DNA, 13 bp, synthetic construct
  source 1..13: mol_type = other DNA
tttcttcggaagc

SEQ ID NO: 561 - DNA, 16 bp, synthetic construct
  source 1..16: mol_type = other DNA
tttggggcaactcaac

SEQ ID NO: 562-621 - skipped (60 entries)

SEQ ID NO: 622 - RNA, 76 nt, synthetic construct
  source 1..76: mol_type = other RNA
ggctccgtggcgcaatggatagcgcattggacttcaaattcaaaggttccgggttcgagtcccggcggagtcgcca

SEQ ID NO: 623 - RNA, 77 nt, synthetic construct
  source 1..77: mol_type = other RNA
  modified_base 1: mod_base = OTHER; note = Nucleotide attached to N-acetylgalactosamine-triethylamine
gggctccgtggcgcaatggatagcgcattggacttcaaattcaaaggttccgggttcgagtcccggcggagtcgcca

SEQ ID NO: 624 - RNA, 76 nt, synthetic construct; identical to SEQ ID NO: 622
  source 1..76: mol_type = other RNA
  modified_base 16: mod_base = OTHER; note = Nucleotide attached to N-acetylgalactosamine

SEQ ID NO: 625 - RNA, 76 nt, synthetic construct; identical to SEQ ID NO: 622
  source 1..76: mol_type = other RNA
  modified_base 20: mod_base = OTHER; note = Nucleotide attached to N-acetylgalactosamine

SEQ ID NO: 626 - RNA, 76 nt, synthetic construct; identical to SEQ ID NO: 622
  source 1..76: mol_type = other RNA
  modified_base 47: mod_base = OTHER; note = Nucleotide attached to N-acetylgalactosamine

SEQ ID NO: 627 - RNA, 76 nt, synthetic construct; identical to SEQ ID NO: 622
  source 1..76: mol_type = other RNA
  modified_base 1: mod_base = OTHER; note = Nucleotide attached to cyanine3 dye
  modified_base 16: mod_base = OTHER; note = Nucleotide attached to N-acetylgalactosamine

SEQ ID NO: 628 - RNA, 76 nt, synthetic construct; identical to SEQ ID NO: 622
  source 1..76: mol_type = other RNA
  modified_base 1: mod_base = OTHER; note = Nucleotide attached to cyanine3 dye
  modified_base 20: mod_base = OTHER; note = Nucleotide attached to N-acetylgalactosamine

SEQ ID NO: 629 - RNA, 76 nt, synthetic construct; identical to SEQ ID NO: 622
  source 1..76: mol_type = other RNA
  modified_base 1: mod_base = OTHER; note = Nucleotide attached to cyanine3 dye
  modified_base 47: mod_base = OTHER; note = Nucleotide attached to N-acetylgalactosamine

SEQ ID NO: 630 - RNA, 76 nt, synthetic construct; identical to SEQ ID NO: 622
  source 1..76: mol_type = other RNA
  modified_base 16: mod_base = OTHER; note = Nucleotide attached to AN1 (C6-U phosphoramidite (5'-Dimethoxytrityl-5-[N-(trifluoroacetylaminohexyl)-3-acry limido]-Uridine, 2'-O-triisopropylsilyloxymethyl-3'-[(2-cyanoethyl)-(N,N-dii sopropyl)]-phosphoramidite))

SEQ ID NO: 631 - RNA, 76 nt, synthetic construct; identical to SEQ ID NO: 622
  source 1..76: mol_type = other RNA
  modified_base 20: mod_base = OTHER; note = Nucleotide attached to AN1 (C6-U phosphoramidite (5'-Dimethoxytrityl-5-[N-(trifluoroacetylaminohexyl)-3-acry limido]-Uridine, 2'-O-triisopropylsilyloxymethyl-3'-[(2-cyanoethyl)-(N,N-dii sopropyl)]-phosphoramidite))

SEQ ID NO: 632 - RNA, 76 nt, synthetic construct; identical to SEQ ID NO: 622
  source 1..76: mol_type = other RNA
  modified_base 47: mod_base = OTHER; note = Nucleotide attached to AN1 (C6-U phosphoramidite (5'-Dimethoxytrityl-5-[N-(trifluoroacetylaminohexyl)-3-acry limido]-Uridine, 2'-O-triisopropylsilyloxymethyl-3'-[(2-cyanoethyl)-(N,N-dii sopropyl)]-phosphoramidite))

SEQ ID NO: 633 - RNA, 75 nt, synthetic construct
  source 1..75: mol_type = other RNA
  modified_base 16: mod_base = OTHER; note = Nucleotide attached to N-acetylgalactosamine
ggttccatggtgtaatggtaagcactctggactttaaatccagcgatccgagttcgagtctcggtggaacctcca

SEQ ID NO: 634 - RNA, 75 nt, synthetic construct; identical to SEQ ID NO: 633
  source 1..75: mol_type = other RNA
  modified_base 19: mod_base = OTHER; note = Nucleotide attached to N-acetylgalactosamine

SEQ ID NO: 635 - RNA, 75 nt, synthetic construct; identical to SEQ ID NO: 633
  source 1..75: mol_type = other RNA
  modified_base 1: mod_base = OTHER; note = Nucleotide attached to cyanine3 dye
  modified_base 16: mod_base = OTHER; note = Nucleotide attached to N-acetylgalactosamine

SEQ ID NO: 636 - RNA, 75 nt, synthetic construct; identical to SEQ ID NO: 633
  source 1..75: mol_type = other RNA
  modified_base 1: mod_base = OTHER; note = Nucleotide attached to cyanine3 dye
  modified_base 19: mod_base = OTHER; note = Nucleotide attached to N-acetylgalactosamine

SEQ ID NO: 637 - RNA, 75 nt, synthetic construct; identical to SEQ ID NO: 633
  source 1..75: mol_type = other RNA
  modified_base 1: mod_base = OTHER; note = Nucleotide attached to cyanine3 dye
  modified_base 47: mod_base = OTHER; note = Nucleotide attached to N-acetylgalactosamine

SEQ ID NO: 638 - RNA, 75 nt, synthetic construct; identical to SEQ ID NO: 633
  source 1..75: mol_type = other RNA
  modified_base 16: mod_base = OTHER; note = Nucleotide attached to AN1 (C6-U phosphoramidite (5'-Dimethoxytrityl-5-[N-(trifluoroacetylaminohexyl)-3-acry limido]-Uridine, 2'-O-triisopropylsilyloxymethyl-3'-[(2-cyanoethyl)-(N,N-dii sopropyl)]-phosphoramidite))

SEQ ID NO: 639 - RNA, 75 nt, synthetic construct; identical to SEQ ID NO: 633
  source 1..75: mol_type = other RNA
  modified_base 19: mod_base = OTHER; note = Nucleotide attached to AN1 (C6-U phosphoramidite (5'-Dimethoxytrityl-5-[N-(trifluoroacetylaminohexyl)-3-acry limido]-Uridine, 2'-O-triisopropylsilyloxymethyl-3'-[(2-cyanoethyl)-(N,N-dii sopropyl)]-phosphoramidite))

SEQ ID NO: 640 - RNA, 75 nt, synthetic construct; identical to SEQ ID NO: 633
  source 1..75: mol_type = other RNA
  modified_base 47: mod_base = OTHER; note = Nucleotide attached to AN1 (C6-U phosphoramidite (5'-Dimethoxytrityl-5-[N-(trifluoroacetylaminohexyl)-3-acry limido]-Uridine, 2'-O-triisopropylsilyloxymethyl-3'-[(2-cyanoethyl)-(N,N-dii sopropyl)]-phosphoramidite))

SEQ ID NO: 641 - RNA, 85 nt, synthetic construct
  source 1..85: mol_type = other RNA
  modified_base 1: mod_base = OTHER; note = Nucleotide attached to N-acetylgalactosamine-triethylamine
gacgaggtggccgagtggttaaggcgatggactctaaatccattgtgctctgcacgcgtgggttcgaatcccatcctcgtcgcca

SEQ ID NO: 642 - RNA, 85 nt, synthetic construct; identical to SEQ ID NO: 641
  source 1..85: mol_type = other RNA
  modified_base 16: mod_base = OTHER; note = Nucleotide attached to N-acetylgalactosamine

SEQ ID NO: 643 - RNA, 85 nt, synthetic construct; identical to SEQ ID NO: 641
  source 1..85: mol_type = other RNA
  modified_base 20: mod_base = OTHER; note = Nucleotide attached to N-acetylgalactosamine

SEQ ID NO: 644 - RNA, 85 nt, synthetic construct; identical to SEQ ID NO: 641
  source 1..85: mol_type = other RNA
  modified_base 46: mod_base = OTHER; note = Nucleotide attached to N-acetylgalactosamine

SEQ ID NO: 645 - RNA, 85 nt, synthetic construct; identical to SEQ ID NO: 641
  source 1..85: mol_type = other RNA
  modified_base 1: mod_base = OTHER; note = Nucleotide attached to cyanine3 dye
  modified_base 20: mod_base = OTHER; note = Nucleotide attached to N-acetylgalactosamine

SEQ ID NO: 646 - RNA, 85 nt, synthetic construct; identical to SEQ ID NO: 641
  source 1..85: mol_type = other RNA
  modified_base 1: mod_base = OTHER; note = Nucleotide attached to cyanine3 dye
  modified_base 46: mod_base = OTHER; note = Nucleotide attached to N-acetylgalactosamine

SEQ ID NO: 647 - RNA, 85 nt, synthetic construct; identical to SEQ ID NO: 641
  source 1..85: mol_type = other RNA
  modified_base 16: mod_base = OTHER; note = Nucleotide attached to AN1 (C6-U phosphoramidite (5'-Dimethoxytrityl-5-[N-(trifluoroacetylaminohexyl)-3-acry limido]-Uridine, 2'-O-triisopropylsilyloxymethyl-3'-[(2-cyanoethyl)-(N,N-dii sopropyl)]-phosphoramidite))

SEQ ID NO: 648 - RNA, 85 nt, synthetic construct; identical to SEQ ID NO: 641
  source 1..85: mol_type = other RNA
  modified_base 20: mod_base = OTHER; note = Nucleotide attached to AN1 (C6-U phosphoramidite (5'-Dimethoxytrityl-5-[N-(trifluoroacetylaminohexyl)-3-acry limido]-Uridine, 2'-O-triisopropylsilyloxymethyl-3'-[(2-cyanoethyl)-(N,N-dii sopropyl)]-phosphoramidite))

SEQ ID NO: 649 - RNA, 85 nt, synthetic construct; identical to SEQ ID NO: 641
  source 1..85: mol_type = other RNA
  modified_base 46: mod_base = OTHER; note = Nucleotide attached to AN1 (C6-U phosphoramidite (5'-Dimethoxytrityl-5-[N-(trifluoroacetylaminohexyl)-3-acry limido]-Uridine, 2'-O-triisopropylsilyloxymethyl-3'-[(2-cyanoethyl)-(N,N-dii sopropyl)]-phosphoramidite))

SEQ ID NO: 650 - RNA, 75 nt, synthetic construct; identical to SEQ ID NO: 633
  source 1..75: mol_type = other RNA

SEQ ID NO: 651 - RNA, 75 nt, synthetic construct; identical to SEQ ID NO: 633
  source 1..75: mol_type = other RNA
  modified_base 1: mod_base = OTHER; note = Nucleotide attached to N-acetylgalactosamine-triethylamine

SEQ ID NO: 652 - RNA, 75 nt, synthetic construct; identical to SEQ ID NO: 633
  source 1..75: mol_type = other RNA
  modified_base 47: mod_base = OTHER; note = Nucleotide attached to N-acetylgalactosamine

SEQ ID NO: 653 - RNA, 85 nt, synthetic construct; identical to SEQ ID NO: 641
  source 1..85: mol_type = other RNA

SEQ ID NO: 654 - RNA, 85 nt, synthetic construct; identical to SEQ ID NO: 641
  source 1..85: mol_type = other RNA
  modified_base 1: mod_base = OTHER; note = Nucleotide attached to cyanine3 dye
  modified_base 16: mod_base = OTHER; note = Nucleotide attached to N-acetylgalactosamine

SEQ ID NO: 655 - RNA, 76 nt, synthetic construct; identical to SEQ ID NO: 622
  source 1..76: mol_type = other RNA
  modified_base 1: mod_base = OTHER; note = 2'-O-methyl modified nucleotide
  modified_base 17: mod_base = OTHER; note = 2'-O-methyl modified nucleotide
  modified_base 18: mod_base = OTHER; note = 2'-O-methyl modified nucleotide
  modified_base 50: mod_base = OTHER; note = 2'-O-methyl modified nucleotide
  modified_base 52: mod_base = OTHER; note = 2'-O-methyl modified nucleotide
  modified_base 73: mod_base = OTHER; note = 2'-O-methyl modified nucleotide

SEQ ID NO: 656 - RNA, 76 nt, synthetic construct; identical to SEQ ID NO: 622
  source 1..76: mol_type = other RNA
  modified_base 1: mod_base = OTHER; note = 2'-O-methyl modified nucleotide with phosphorothioate linkage
  modified_base 2: mod_base = OTHER; note = 2'-O-methyl modified nucleotide with phosphorothioate linkage
  modified_base 43: mod_base = OTHER; note = Nucleotide with phosphorothioate linkage
  modified_base 55: mod_base = OTHER; note = Nucleotide with phosphorothioate linkage
  modified_base 74: mod_base = OTHER; note = Nucleotide with phosphorothioate linkage
  modified_base 75: mod_base = OTHER; note = 2'-O-methyl modified nucleotide

SEQ ID NO: 657 - RNA, 76 nt, synthetic construct; identical to SEQ ID NO: 622
  source 1..76: mol_type = other RNA
  modified_base 1: mod_base = OTHER; note = 2'-O-methyl modified nucleotide with phosphorothioate linkage
  modified_base 2: mod_base = OTHER; note = 2'-O-methyl modified nucleotide with phosphorothioate linkage
  modified_base 74: mod_base = OTHER; note = Nucleotide with phosphorothioate linkage
  modified_base 75: mod_base = OTHER; note = 2'-O-methyl modified nucleotide

SEQ ID NO: 658 - DNA, 76 bp, synthetic construct
  source 1..76: mol_type = other DNA
  modified_base 1: mod_base = OTHER; note = 2'-O-methyl modified nucleotide with phosphorothioate linkage
  modified_base 2: mod_base = OTHER; note = 2'-O-methyl modified nucleotide with phosphorothioate linkage
  modified_base 27: mod_base = OTHER; note = Nucleotide with phosphorothioate linkage
  modified_base 51: mod_base = OTHER; note = Nucleotide with phosphorothioate linkage
  modified_base 59: mod_base = OTHER; note = 2'-fluoro modified nucleotide
  modified_base 74: mod_base = OTHER; note = Nucleotide with phosphorothioate linkage
  modified_base 75: mod_base = OTHER; note = 2'-O-methyl modified nucleotide
  misc_feature 1..51: note = RNA
  misc_feature 52: note = DNA
  misc_feature 53..76: note = RNA
ggctccgtggcgcaatggatagcgcattggacttcaaattcaaaggttccgggttcgagtcccggcggagtcgcca

SEQ ID NO: 659 - RNA, 76 nt, synthetic construct; identical to SEQ ID NO: 622
  source 1..76: mol_type = other RNA
  modified_base 1: mod_base = OTHER; note = 2'-O-methyl modified nucleotide with phosphorothioate linkage
  modified_base 2: mod_base = OTHER; note = 2'-O-methyl modified nucleotide with phosphorothioate linkage
  modified_base 13: mod_base = OTHER; note = 2'-fluoro modified nucleotide
  modified_base 14: mod_base = OTHER; note = 2'-fluoro modified nucleotide
  modified_base 54: mod_base = OTHER; note = 2'-fluoro modified nucleotide
  modified_base 59: mod_base = OTHER; note = 2'-O-methyl modified nucleotide
  modified_base 73: mod_base = OTHER; note = Nucleotide with phosphorothioate linkage
  modified_base 75: mod_base = OTHER; note = Nucleotide with phosphorothioate linkage
  modified_base 76: mod_base = OTHER; note = 2'-O-methyl modified nucleotide

SEQ ID NO: 660 - RNA, 76 nt, synthetic construct; identical to SEQ ID NO: 622
  source 1..76: mol_type = other RNA
  modified_base 1: mod_base = OTHER; note = 2'-O-methyl modified nucleotide with phosphorothioate linkage
  modified_base 2: mod_base = OTHER; note = 2'-O-methyl modified nucleotide with phosphorothioate linkage
  modified_base 45: mod_base = OTHER; note = 2'-fluoro modified nucleotide
  modified_base 57: mod_base = OTHER; note = 2'-fluoro modified nucleotide
  modified_base 68: mod_base = OTHER; note = 2'-fluoro modified nucleotide
  modified_base 74: mod_base = OTHER; note = Nucleotide with phosphorothioate linkage
  modified_base 75: mod_base = OTHER; note = 2'-O-methyl modified nucleotide with phosphorothioate linkage
  modified_base 76: mod_base = OTHER; note = 2'-O-methyl modified nucleotide

SEQ ID NO: 661 - RNA, 76 nt, synthetic construct; identical to SEQ ID NO: 622
  source 1..76: mol_type = other RNA
  modified_base 1: mod_base = OTHER; note = 2'-O-methyl modified nucleotide with phosphorothioate linkage
  modified_base 2: mod_base = OTHER; note = 2'-O-methyl modified nucleotide
  modified_base 74: mod_base = OTHER; note = Nucleotide with phosphorothioate linkage
  modified_base 75: mod_base = OTHER; note = 2'-O-methyl modified nucleotide

SEQ ID NO: 662 - DNA, 76 bp, synthetic construct; identical to SEQ ID NO: 658
  source 1..76: mol_type = other DNA
  modified_base 1: mod_base = OTHER; note = 2'-O-methyl modified nucleotide with phosphorothioate linkage
  modified_base 2: mod_base = OTHER; note = 2'-O-methyl modified nucleotide with phosphorothioate linkage
  modified_base 27: mod_base = OTHER; note = Nucleotide with phosphorothioate linkage
  modified_base 51: mod_base = OTHER; note = Nucleotide with phosphorothioate linkage
  modified_base 59: mod_base = OTHER; note = 2'-fluoro modified nucleotide
  modified_base 73: mod_base = OTHER; note = Nucleotide with phosphorothioate linkage
  modified_base 74: mod_base = OTHER; note = Nucleotide with phosphorothioate linkage
  modified_base 75: mod_base = OTHER; note = 2'-O-methyl modified nucleotide
  misc_feature 1..51: note = RNA
  misc_feature 52: note = DNA
  misc_feature 53..76: note = RNA

SEQ ID NO: 663 - RNA, 76 nt, synthetic construct; identical to SEQ ID NO: 622
  source 1..76: mol_type = other RNA
  modified_base 1: mod_base = OTHER; note = 2'-O-methyl modified nucleotide with phosphorothioate linkage
  modified_base 2: mod_base = OTHER; note = 2'-O-methyl modified nucleotide
  modified_base 25: mod_base = OTHER; note = 2'-fluoro modified nucleotide
  modified_base 74: mod_base = OTHER; note = Nucleotide with phosphorothioate linkage
  modified_base 75: mod_base = OTHER; note = 2'-O-methyl modified nucleotide

SEQ ID NO: 664 - RNA, 76 nt, synthetic construct; identical to SEQ ID NO: 622
  source 1..76: mol_type = other RNA
  modified_base 1: mod_base = OTHER; note = 2'-O-methyl modified nucleotide with phosphorothioate linkage
  modified_base 2: mod_base = OTHER; note = 2'-O-methyl modified nucleotide with phosphorothioate linkage
  modified_base 13: mod_base = OTHER; note = 2'-fluoro modified nucleotide
  modified_base 14: mod_base = OTHER; note = 2'-fluoro modified nucleotide
  modified_base 54: mod_base = OTHER; note = 2'-fluoro modified nucleotide
  modified_base 59: mod_base = OTHER; note = 2'-O-methyl modified nucleotide
  modified_base 75: mod_base = OTHER; note = Nucleotide with phosphorothioate linkage
  modified_base 76: mod_base = OTHER; note = 2'-O-methyl modified nucleotide

SEQ ID NO: 665 - RNA, 76 nt, synthetic construct; identical to SEQ ID NO: 622
  source 1..76: mol_type = other RNA
  modified_base 1: mod_base = OTHER; note = 2'-O-methyl modified nucleotide with phosphorothioate linkage
  modified_base 2: mod_base = OTHER; note = 2'-O-methyl modified nucleotide
  modified_base 73: mod_base = OTHER; note = Nucleotide with phosphorothioate linkage
  modified_base 74: mod_base = OTHER; note = Nucleotide with phosphorothioate linkage
  modified_base 75: mod_base = OTHER; note = 2'-O-methyl modified nucleotide

SEQ ID NO: 666 - DNA, 76 bp, synthetic construct; identical to SEQ ID NO: 658
  source 1..76: mol_type = other DNA
  modified_base 1: mod_base = OTHER; note = 2'-O-methyl modified nucleotide with phosphorothioate linkage
  modified_base 2: mod_base = OTHER; note = 2'-O-methyl modified nucleotide with phosphorothioate linkage
  modified_base 52: mod_base = OTHER; note = 2'-O-methyl modified nucleotide
  modified_base 63: mod_base = OTHER; note = Nucleotide with phosphorothioate linkage
  modified_base 74: mod_base = OTHER; note = Nucleotide with phosphorothioate linkage
  modified_base 75: mod_base = OTHER; note = 2'-O-methyl modified nucleotide with phosphorothioate linkage
  modified_base 76: mod_base = OTHER; note = 2'-O-methyl modified nucleotide
  misc_feature 1..63: note = RNA
  misc_feature 64: note = DNA
  misc_feature 65..76: note = RNA

SEQ ID NO: 667 - RNA, 76 nt, synthetic construct; identical to SEQ ID NO: 622
  source 1..76: mol_type = other RNA
  modified_base 1: mod_base = OTHER; note = 2'-O-methyl modified nucleotide attached to N-acetylgalactosamine-triethylamine
  modified_base 17: mod_base = OTHER; note = 2'-O-methyl modified nucleotide
  modified_base 18: mod_base = OTHER; note = 2'-O-methyl modified nucleotide
  modified_base 50: mod_base = OTHER; note = 2'-O-methyl modified nucleotide
  modified_base 52: mod_base = OTHER; note = 2'-O-methyl modified nucleotide
  modified_base 73: mod_base = OTHER; note = 2'-O-methyl modified nucleotide

SEQ ID NO: 668 - RNA, 76 nt, synthetic construct; identical to SEQ ID NO: 622
  source 1..76: mol_type = other RNA
  modified_base 1: mod_base = OTHER; note = 2'-O-methyl modified nucleotide with phosphorothioate linkage attached to N-acetylgalactosamine-triethylamine
  modified_base 2: mod_base = OTHER; note = 2'-O-methyl modified nucleotide with phosphorothioate linkage
  modified_base 43: mod_base = OTHER; note = Nucleotide with phosphorothioate linkage
  modified_base 55: mod_base = OTHER; note = Nucleotide with phosphorothioate linkage
  modified_base 74: mod_base = OTHER; note = Nucleotide with phosphorothioate linkage
  modified_base 75: mod_base = OTHER; note = 2'-O-methyl modified nucleotide

SEQ ID NO: 669 - RNA, 76 nt, synthetic construct; identical to SEQ ID NO: 622
  source 1..76: mol_type = other RNA
  modified_base 1: mod_base = OTHER; note = 2'-O-methyl modified nucleotide with phosphorothioate linkage attached to N-acetylgalactosamine-triethylamine
  modified_base 2: mod_base = OTHER; note = 2'-O-methyl modified nucleotide with phosphorothioate linkage
  modified_base 74: mod_base = OTHER; note = Nucleotide with phosphorothioate linkage
  modified_base 75: mod_base = OTHER; note = 2'-O-methyl modified nucleotide

SEQ ID NO: 670 - DNA, 76 bp, synthetic construct; identical to SEQ ID NO: 658
  source 1..76: mol_type = other DNA
  modified_base 1: mod_base = OTHER; note = 2'-O-methyl modified nucleotide with phosphorothioate linkage attached to N-acetylgalactosamine-triethylamine
  modified_base 2: mod_base = OTHER; note = 2'-O-methyl modified nucleotide with phosphorothioate linkage
  modified_base 27: mod_base = OTHER; note = Nucleotide with phosphorothioate linkage
  modified_base 51: mod_base = OTHER; note = Nucleotide with phosphorothioate linkage
  modified_base 59: mod_base = OTHER; note = 2'-fluoro modified nucleotide
  modified_base 74: mod_base = OTHER; note = Nucleotide with phosphorothioate linkage
  modified_base 75: mod_base = OTHER; note = 2'-O-methyl modified nucleotide
  misc_feature 1..51: note = RNA
  misc_feature 52: note = DNA
  misc_feature 53..76: note = RNA

SEQ ID NO: 671 - RNA, 76 nt, synthetic construct; identical to SEQ ID NO: 622
  source 1..76: mol_type = other RNA
  modified_base 1: mod_base = OTHER; note = 2'-O-methyl modified nucleotide with phosphorothioate linkage attached to N-acetylgalactosamine-triethylamine
  modified_base 2: mod_base = OTHER; note = 2'-O-methyl modified nucleotide with phosphorothioate linkage
  modified_base 13: mod_base = OTHER; note = 2'-fluoro modified nucleotide
  modified_base 14: mod_base = OTHER; note = 2'-fluoro modified nucleotide
  modified_base 54: mod_base = OTHER; note = 2'-fluoro modified nucleotide
  modified_base 59: mod_base = OTHER; note = 2'-O-methyl modified nucleotide
  modified_base 73: mod_base = OTHER; note = Nucleotide with phosphorothioate linkage
  modified_base 75: mod_base = OTHER; note = Nucleotide with phosphorothioate linkage
  modified_base 76: mod_base = OTHER; note = 2'-O-methyl modified nucleotide

SEQ ID NO: 672 - RNA, 76 nt, synthetic construct; identical to SEQ ID NO: 622
  source 1..76: mol_type = other RNA
  modified_base 1: mod_base = OTHER; note = 2'-O-methyl modified nucleotide with phosphorothioate linkage attached to N-acetylgalactosamine-triethylamine
  modified_base 2: mod_base = OTHER; note = 2'-O-methyl modified nucleotide with phosphorothioate linkage
  modified_base 45: mod_base = OTHER; note = 2'-fluoro modified nucleotide
  modified_base 57: mod_base = OTHER; note = 2'-fluoro modified nucleotide
  modified_base 68: mod_base = OTHER; note = 2'-fluoro modified nucleotide
  modified_base 74: mod_base = OTHER; note = Nucleotide with phosphorothioate linkage
  modified_base 75: mod_base = OTHER; note = 2'-O-methyl modified nucleotide with phosphorothioate linkage
  modified_base 76: mod_base = OTHER; note = 2'-O-methyl modified nucleotide

SEQ ID NO: 673 - RNA, 76 nt, synthetic construct; identical to SEQ ID NO: 622
  source 1..76: mol_type = other RNA
  modified_base 1: mod_base = OTHER; note = 2'-O-methyl modified nucleotide with phosphorothioate linkage attached to N-acetylgalactosamine-triethylamine
  modified_base 2: mod_base = OTHER; note = 2'-O-methyl modified nucleotide
  modified_base 74: mod_base = OTHER; note = Nucleotide with phosphorothioate linkage
  modified_base 75: mod_base = OTHER; note = 2'-O-methyl modified nucleotide

SEQ ID NO: 674 - DNA, 76 bp, synthetic construct; identical to SEQ ID NO: 658
  source 1..76: mol_type = other DNA
  modified_base 1: mod_base = OTHER; note = 2'-O-methyl modified nucleotide with phosphorothioate linkage attached to N-acetylgalactosamine-triethylamine
  modified_base 2: mod_base = OTHER; note = 2'-O-methyl modified nucleotide with phosphorothioate linkage
  modified_base 27: mod_base = OTHER; note = Nucleotide with phosphorothioate linkage
  modified_base 51: mod_base = OTHER; note = Nucleotide with phosphorothioate linkage
  modified_base 59: mod_base = OTHER; note = 2'-fluoro modified nucleotide
  modified_base 73: mod_base = OTHER; note = Nucleotide with phosphorothioate linkage
  modified_base 74: mod_base = OTHER; note = Nucleotide with phosphorothioate linkage
  modified_base 75: mod_base = OTHER; note = 2'-O-methyl modified nucleotide
  misc_feature 1..51: note = RNA
  misc_feature 52: note = DNA
  misc_feature 53..76: note = RNA

SEQ ID NO: 675 - RNA, 76 nt, synthetic construct; identical to SEQ ID NO: 622
  source 1..76: mol_type = other RNA
  modified_base 1: mod_base = OTHER; note = 2'-O-methyl modified nucleotide with phosphorothioate linkage attached to N-acetylgalactosamine-triethylamine
  modified_base 2: mod_base = OTHER; note = 2'-O-methyl modified nucleotide
  modified_base 25: mod_base = OTHER; note = 2'-fluoro modified nucleotide
  modified_base 74: mod_base = OTHER; note = Nucleotide with phosphorothioate linkage
  modified_base 75: mod_base = OTHER; note = 2'-O-methyl modified nucleotide

SEQ ID NO: 676 - RNA, 76 nt, synthetic construct; identical to SEQ ID NO: 622
  source 1..76: mol_type = other RNA
  modified_base 1: mod_base = OTHER; note = 2'-O-methyl modified nucleotide with phosphorothioate linkage attached to N-acetylgalactosamine-triethylamine
  modified_base 2: mod_base = OTHER; note = 2'-O-methyl modified nucleotide with phosphorothioate linkage
  modified_base 13: mod_base = OTHER; note = 2'-fluoro modified nucleotide
  modified_base 14: mod_base = OTHER; note = 2'-fluoro modified nucleotide
  modified_base 54: mod_base = OTHER; note = 2'-fluoro modified nucleotide
  modified_base 59: mod_base = OTHER; note = 2'-O-methyl modified nucleotide
  modified_base 75: mod_base = OTHER; note = Nucleotide with phosphorothioate linkage
  modified_base 76: mod_base = OTHER; note = 2'-O-methyl modified nucleotide

SEQ ID NO: 677 - RNA, 76 nt, synthetic construct; identical to SEQ ID NO: 622
  source 1..76: mol_type = other RNA
  modified_base 1: mod_base = OTHER; note = 2'-O-methyl modified nucleotide with phosphorothioate linkage attached to N-acetylgalactosamine-triethylamine
  modified_base 2: mod_base = OTHER; note = 2'-O-methyl modified nucleotide
  modified_base 73: mod_base = OTHER; note = Nucleotide with phosphorothioate linkage
  modified_base 74: mod_base = OTHER; note = Nucleotide with phosphorothioate linkage
  modified_base 75: mod_base = OTHER; note = 2'-O-methyl modified nucleotide

SEQ ID NO: 678 - DNA, 76 bp, synthetic construct; identical to SEQ ID NO: 658
  source 1..76: mol_type = other DNA
  modified_base 1: mod_base = OTHER; note = 2'-O-methyl modified nucleotide with phosphorothioate linkage attached to N-acetylgalactosamine-triethylamine
  modified_base 2: mod_base = OTHER; note = 2'-O-methyl modified nucleotide with phosphorothioate linkage
  modified_base 52: mod_base = OTHER; note = 2'-O-methyl modified nucleotide
  modified_base 63: mod_base = OTHER; note = Nucleotide with phosphorothioate linkage
  modified_base 74: mod_base = OTHER; note = Nucleotide with phosphorothioate linkage
  modified_base 75: mod_base = OTHER; note = 2'-O-methyl modified nucleotide with phosphorothioate linkage
  modified_base 76: mod_base = OTHER; note = 2'-O-methyl modified nucleotide
  misc_feature 1..63: note = RNA
  misc_feature 64: note = DNA
  misc_feature 65..76: note = RNA

SEQ ID NO: 679 - RNA, 76 nt, synthetic construct; identical to SEQ ID NO: 622
  source 1..76: mol_type = other RNA
  modified_base 1: mod_base = OTHER; note = 2'-O-methyl modified nucleotide
  modified_base 16: mod_base = OTHER; note = Nucleotide attached to N-acetylgalactosamine
  modified_base 17: mod_base = OTHER; note = 2'-O-methyl modified nucleotide
  modified_base 18: mod_base = OTHER; note = 2'-O-methyl modified nucleotide
  modified_base 50: mod_base = OTHER; note = 2'-O-methyl modified nucleotide
  modified_base 52: mod_base = OTHER; note = 2'-O-methyl modified nucleotide
  modified_base 73: mod_base = OTHER; note = 2'-O-methyl modified nucleotide

SEQ ID NO: 680 - RNA, 76 nt, synthetic construct; identical to SEQ ID NO: 622
  source 1..76: mol_type = other RNA
  modified_base 1: mod_base = OTHER; note = 2'-O-methyl modified nucleotide with phosphorothioate linkage
  modified_base 2: mod_base = OTHER; note = 2'-O-methyl modified nucleotide with phosphorothioate linkage
  modified_base 16: mod_base = OTHER; note = Nucleotide attached to N-acetylgalactosamine
  modified_base 43: mod_base = OTHER; note = Nucleotide with phosphorothioate linkage
  modified_base 55: mod_base = OTHER; note = Nucleotide with phosphorothioate linkage
  modified_base 74: mod_base = OTHER; note = Nucleotide with phosphorothioate linkage
  modified_base 75: mod_base = OTHER; note = 2'-O-methyl modified nucleotide

SEQ ID NO: 681 - RNA, 76 nt, synthetic construct; identical to SEQ ID NO: 622
  source 1..76: mol_type = other RNA
  modified_base 1: mod_base = OTHER; note = 2'-O-methyl modified nucleotide with phosphorothioate linkage
  modified_base 2: mod_base = OTHER; note = 2'-O-methyl modified nucleotide with phosphorothioate linkage
  modified_base 16: mod_base = OTHER; note = Nucleotide attached to N-acetylgalactosamine
  modified_base 74: mod_base = OTHER; note = Nucleotide with phosphorothioate linkage
  modified_base 75: mod_base = OTHER; note = 2'-O-methyl modified nucleotide

SEQ ID NO: 682 - DNA, 76 bp, synthetic construct; identical to SEQ ID NO: 658
  source 1..76: mol_type = other DNA
  modified_base 1: mod_base = OTHER; note = 2'-O-methyl modified nucleotide with phosphorothioate linkage
  modified_base 2: mod_base = OTHER; note = 2'-O-methyl modified nucleotide with phosphorothioate linkage
  modified_base 16: mod_base = OTHER; note = Nucleotide attached to N-acetylgalactosamine
  modified_base 27: mod_base = OTHER; note = Nucleotide with phosphorothioate linkage
  modified_base 51: mod_base = OTHER; note = Nucleotide with phosphorothioate linkage
  modified_base 59: mod_base = OTHER; note = 2'-fluoro modified nucleotide
  modified_base 74: mod_base = OTHER; note = Nucleotide with phosphorothioate linkage
  modified_base 75: mod_base = OTHER; note = 2'-O-methyl modified nucleotide
  misc_feature 1..51: note = RNA
  misc_feature 52: note = DNA
  misc_feature 53..76: note = RNA

SEQ ID NO: 683 - RNA, 76 nt, synthetic construct; identical to SEQ ID NO: 622
  source 1..76: mol_type = other RNA
  modified_base 1: mod_base = OTHER; note = 2'-O-methyl modified nucleotide with phosphorothioate linkage
  modified_base 2: mod_base = OTHER; note = 2'-O-methyl modified nucleotide with phosphorothioate linkage
  modified_base 13: mod_base = OTHER; note = 2'-fluoro modified nucleotide
  modified_base 14: mod_base = OTHER; note = 2'-fluoro modified nucleotide
  modified_base 16: mod_base = OTHER; note = Nucleotide attached to N-acetylgalactosamine
  modified_base 54: mod_base = OTHER; note = 2'-fluoro modified nucleotide
  modified_base 59: mod_base = OTHER; note = 2'-O-methyl modified nucleotide
  modified_base 73: mod_base = OTHER; note = Nucleotide with phosphorothioate linkage
  modified_base 75: mod_base = OTHER; note = Nucleotide with phosphorothioate linkage
  modified_base 76: mod_base = OTHER; note = 2'-O-methyl modified nucleotide

SEQ ID NO: 684 - RNA, 76 nt, synthetic construct; identical to SEQ ID NO: 622
  source 1..76: mol_type = other RNA
  modified_base 1: mod_base = OTHER; note = 2'-O-methyl modified nucleotide with phosphorothioate linkage
  modified_base 2: mod_base = OTHER; note = 2'-O-methyl modified nucleotide with phosphorothioate linkage
  modified_base 16: mod_base = OTHER; note = Nucleotide attached to N-acetylgalactosamine
  modified_base 45: mod_base = OTHER; note = 2'-fluoro modified nucleotide
  modified_base 57: mod_base = OTHER; note = 2'-fluoro modified nucleotide
  modified_base 68: mod_base = OTHER; note = 2'-fluoro modified nucleotide
  modified_base 74: mod_base = OTHER; note = Nucleotide with phosphorothioate linkage
  modified_base 75: mod_base = OTHER; note = 2'-O-methyl modified nucleotide with phosphorothioate linkage
  modified_base 76: mod_base = OTHER; note = 2'-O-methyl modified nucleotide

SEQ ID NO: 685 - RNA, 76 nt, synthetic construct; identical to SEQ ID NO: 622
  source 1..76: mol_type = other RNA
  modified_base 1: mod_base = OTHER; note = 2'-O-methyl modified nucleotide with phosphorothioate linkage
  modified_base 2: mod_base = OTHER; note = 2'-O-methyl modified nucleotide
  modified_base 16: mod_base = OTHER; note = Nucleotide attached to N-acetylgalactosamine
  modified_base 74: mod_base = OTHER; note = Nucleotide with phosphorothioate linkage
  modified_base 75: mod_base = OTHER; note = 2'-O-methyl modified nucleotide

SEQ ID NO: 686 - DNA, 76 bp, synthetic construct; identical to SEQ ID NO: 658
  source 1..76: mol_type = other DNA
  modified_base 1: mod_base = OTHER; note = 2'-O-methyl modified nucleotide with phosphorothioate linkage
  modified_base 2: mod_base = OTHER; note = 2'-O-methyl modified nucleotide with phosphorothioate linkage
  modified_base 16: mod_base = OTHER; note = Nucleotide attached to N-acetylgalactosamine
  modified_base 27: mod_base = OTHER; note = Nucleotide with phosphorothioate linkage
  modified_base 51: mod_base = OTHER; note = Nucleotide with phosphorothioate linkage
  modified_base 59: mod_base = OTHER; note = 2'-fluoro modified nucleotide
  modified_base 73: mod_base = OTHER; note = Nucleotide with phosphorothioate linkage
  modified_base 74: mod_base = OTHER; note = Nucleotide with phosphorothioate linkage
  modified_base 75: mod_base = OTHER; note = 2'-O-methyl modified nucleotide
  misc_feature 1..51: note = RNA
  misc_feature 52: note = DNA
  misc_feature 53..76: note = RNA

SEQ ID NO: 687 - RNA, 76 nt, synthetic construct; identical to SEQ ID NO: 622
  source 1..76: mol_type = other RNA
  modified_base 1: mod_base = OTHER; note = 2'-O-methyl modified nucleotide with phosphorothioate linkage
  modified_base 2: mod_base = OTHER; note = 2'-O-methyl modified nucleotide
  modified_base 16: mod_base = OTHER; note = Nucleotide attached to N-acetylgalactosamine
  modified_base 25: mod_base = OTHER; note = 2'-fluoro modified nucleotide
  modified_base 74: mod_base = OTHER; note = Nucleotide with phosphorothioate linkage
  modified_base 75: mod_base = OTHER; note = 2'-O-methyl modified nucleotide

SEQ ID NO: 688 - RNA, 76 nt, synthetic construct; identical to SEQ ID NO: 622
  source 1..76: mol_type = other RNA
  modified_base 1: mod_base = OTHER; note = 2'-O-methyl modified nucleotide with phosphorothioate linkage
  modified_base 2: mod_base = OTHER; note = 2'-O-methyl modified nucleotide with phosphorothioate linkage
  modified_base 13: mod_base = OTHER; note = 2'-fluoro modified nucleotide
  modified_base 14: mod_base = OTHER; note = 2'-fluoro modified nucleotide
  modified_base 16: mod_base = OTHER; note = Nucleotide attached to N-acetylgalactosamine
  modified_base 54: mod_base = OTHER; note = 2'-fluoro modified nucleotide
  modified_base 59: mod_base = OTHER; note = 2'-O-methyl modified nucleotide
  modified_base 75: mod_base = OTHER; note = Nucleotide with phosphorothioate linkage
  modified_base 76: mod_base = OTHER; note = 2'-O-methyl modified nucleotide

SEQ ID NO: 689 - RNA, 76 nt, synthetic construct; identical to SEQ ID NO: 622
  source 1..76: mol_type = other RNA
  modified_base 1: mod_base = OTHER; note = 2'-O-methyl modified nucleotide with phosphorothioate linkage
  modified_base 2: mod_base = OTHER; note = 2'-O-methyl modified nucleotide
  modified_base 16: mod_base = OTHER; note = Nucleotide attached to N-acetylgalactosamine
  modified_base 73: mod_base = OTHER; note = Nucleotide with phosphorothioate linkage
  modified_base 74: mod_base = OTHER; note = Nucleotide with phosphorothioate linkage
  modified_base 75: mod_base = OTHER; note = 2'-O-methyl modified nucleotide

SEQ ID NO: 690 - DNA, 76 bp, synthetic construct; identical to SEQ ID NO: 658
  source 1..76: mol_type = other DNA
  modified_base 1: mod_base = OTHER; note = 2'-O-methyl modified nucleotide with phosphorothioate linkage
  modified_base 2: mod_base = OTHER; note = 2'-O-methyl modified nucleotide with phosphorothioate linkage
  modified_base 16: mod_base = OTHER; note = Nucleotide attached to N-acetylgalactosamine
  modified_base 52: mod_base = OTHER; note = 2'-O-methyl modified nucleotide
  modified_base 63: mod_base = OTHER; note = Nucleotide with phosphorothioate linkage
  modified_base 74: mod_base = OTHER; note = Nucleotide with phosphorothioate linkage
  modified_base 75: mod_base = OTHER; note = 2'-O-methyl modified nucleotide with phosphorothioate linkage
  modified_base 76: mod_base = OTHER; note = 2'-O-methyl modified nucleotide
  misc_feature 1..63: note = RNA
  misc_feature 64: note = DNA
  misc_feature 65..76: note = RNA

SEQ ID NO: 691 - RNA, 76 nt, synthetic construct; identical to SEQ ID NO: 622
  source 1..76: mol_type = other RNA
  modified_base 1: mod_base = OTHER; note = 2'-O-methyl modified nucleotide
  modified_base 17: mod_base = OTHER; note = 2'-O-methyl modified nucleotide
  modified_base 18: mod_base = OTHER; note = 2'-O-methyl modified nucleotide
  modified_base 20: mod_base = OTHER; note = Nucleotide attached to N-acetylgalactosamine
  modified_base 50: mod_base = OTHER; note = 2'-O-methyl modified nucleotide
  modified_base 52: mod_base = OTHER; note = 2'-O-methyl modified nucleotide
  modified_base 73: mod_base = OTHER; note = 2'-O-methyl modified nucleotide

SEQ ID NO: 692 - RNA, 76 nt, synthetic construct; identical to SEQ ID NO: 622
  source 1..76: mol_type = other RNA
  modified_base 1: mod_base = OTHER; note = 2'-O-methyl modified nucleotide with phosphorothioate linkage
  modified_base 2: mod_base = OTHER; note = 2'-O-methyl modified nucleotide with phosphorothioate linkage
  modified_base 20: mod_base = OTHER; note = Nucleotide attached to N-acetylgalactosamine
  modified_base 43: mod_base = OTHER; note = Nucleotide with phosphorothioate linkage
  modified_base 55: mod_base = OTHER; note = Nucleotide with phosphorothioate linkage
  modified_base 74: mod_base = OTHER; note = Nucleotide with phosphorothioate linkage
  modified_base 75: mod_base = OTHER; note = 2'-O-methyl modified nucleotide

SEQ ID NO: 693 - RNA, 76 nt, synthetic construct; identical to SEQ ID NO: 622
  source 1..76: mol_type = other RNA
  modified_base 1: mod_base = OTHER; note = 2'-O-methyl modified nucleotide with phosphorothioate linkage
  modified_base 2: mod_base = OTHER; note = 2'-O-methyl modified nucleotide with phosphorothioate linkage
  modified_base 20: mod_base = OTHER; note = Nucleotide attached to N-acetylgalactosamine
  modified_base 74: mod_base = OTHER; note = Nucleotide with phosphorothioate linkage
  modified_base 75: mod_base = OTHER; note = 2'-O-methyl modified nucleotide

SEQ ID NO: 694 - DNA, 76 bp, synthetic construct; identical to SEQ ID NO: 658
  source 1..76: mol_type = other DNA
  modified_base 1: mod_base = OTHER; note = 2'-O-methyl modified nucleotide with phosphorothioate linkage
  modified_base 2: mod_base = OTHER; note = 2'-O-methyl modified nucleotide with phosphorothioate linkage
  modified_base 20: mod_base = OTHER; note = Nucleotide attached to N-acetylgalactosamine
  modified_base 27: mod_base = OTHER; note = Nucleotide with phosphorothioate linkage
  modified_base 51: mod_base = OTHER; note = Nucleotide with phosphorothioate linkage
  modified_base 59: mod_base = OTHER; note = 2'-fluoro modified nucleotide
  modified_base 74: mod_base = OTHER; note = Nucleotide with phosphorothioate linkage
  modified_base 75: mod_base = OTHER; note = 2'-O-methyl modified nucleotide
  misc_feature 1..51: note = RNA
  misc_feature 52: note = DNA
  misc_feature 53..76: note = RNA

SEQ ID NO: 695 - RNA, 76 nt, synthetic construct; identical to SEQ ID NO: 622
  source 1..76: mol_type = other RNA
  modified_base 1: mod_base = OTHER; note = 2'-O-methyl modified nucleotide with phosphorothioate linkage
  modified_base 2: mod_base = OTHER; note = 2'-O-methyl modified nucleotide with phosphorothioate linkage
  modified_base 13: mod_base = OTHER; note = 2'-fluoro modified nucleotide
  modified_base 14: mod_base = OTHER; note = 2'-fluoro modified nucleotide
  modified_base 20: mod_base = OTHER; note = Nucleotide attached to N-acetylgalactosamine
  modified_base 54: mod_base = OTHER; note = 2'-fluoro modified nucleotide
  modified_base 59: mod_base = OTHER; note = 2'-O-methyl modified nucleotide
  modified_base 73: mod_base = OTHER; note = Nucleotide with phosphorothioate linkage
  modified_base 75: mod_base = OTHER; note = Nucleotide with phosphorothioate linkage
  modified_base 76: mod_base = OTHER; note = 2'-O-methyl modified nucleotide

SEQ ID NO: 696 - RNA, 76 nt, synthetic construct; identical to SEQ ID NO: 622
  source 1..76: mol_type = other RNA
  modified_base 1: mod_base = OTHER; note = 2'-O-methyl modified nucleotide with phosphorothioate linkage
  modified_base 2: mod_base = OTHER; note = 2'-O-methyl modified nucleotide with phosphorothioate linkage
  modified_base 20: mod_base = OTHER; note = Nucleotide attached to N-acetylgalactosamine
  modified_base 45: mod_base = OTHER; note = 2'-fluoro modified nucleotide
  modified_base 57: mod_base = OTHER; note = 2'-fluoro modified nucleotide
  modified_base 68: mod_base = OTHER; note = 2'-fluoro modified nucleotide
  modified_base 74: mod_base = OTHER; note = Nucleotide with phosphorothioate linkage
  modified_base 75: mod_base = OTHER; note = 2'-O-methyl modified nucleotide with phosphorothioate linkage
  modified_base 76: mod_base = OTHER; note = 2'-O-methyl modified nucleotide

SEQ ID NO: 697 - RNA, 76 nt, synthetic construct; identical to SEQ ID NO: 622
  source 1..76: mol_type = other RNA
  modified_base 1: mod_base = OTHER; note = 2'-O-methyl modified nucleotide with phosphorothioate linkage
  modified_base 2: mod_base = OTHER; note = 2'-O-methyl modified nucleotide
  modified_base 20: mod_base = OTHER; note = Nucleotide attached to N-acetylgalactosamine
  modified_base 74: mod_base = OTHER; note = Nucleotide with phosphorothioate linkage
  modified_base 75: mod_base = OTHER; note = 2'-O-methyl modified nucleotide

SEQ ID NO: 698 - DNA, 76 bp, synthetic construct; identical to SEQ ID NO: 658
  source 1..76: mol_type = other DNA
  modified_base 1: mod_base = OTHER; note = 2'-O-methyl modified nucleotide with phosphorothioate linkage
  modified_base 2: mod_base = OTHER; note = 2'-O-methyl modified nucleotide with phosphorothioate linkage
  modified_base 20: mod_base = OTHER; note = Nucleotide attached to N-acetylgalactosamine
  modified_base 27: mod_base = OTHER; note = Nucleotide with phosphorothioate linkage
  modified_base 51: mod_base = OTHER; note = Nucleotide with phosphorothioate linkage
  modified_base 59: mod_base = OTHER; note = 2'-fluoro modified nucleotide
  modified_base 73: mod_base = OTHER; note = Nucleotide with phosphorothioate linkage
  modified_base 74: mod_base = OTHER; note = Nucleotide with phosphorothioate linkage
  modified_base 75: mod_base = OTHER; note = 2'-O-methyl modified nucleotide
  misc_feature 1..51: note = RNA
  misc_feature 52: note = DNA
  misc_feature 53..76: note = RNA

SEQ ID NO: 699 - RNA, 76 nt, synthetic construct; identical to SEQ ID NO: 622
  source 1..76: mol_type = other RNA
  modified_base 1: mod_base = OTHER; note = 2'-O-methyl modified nucleotide with phosphorothioate linkage
  modified_base 2: mod_base = OTHER; note = 2'-O-methyl modified nucleotide
  modified_base 20: mod_base = OTHER; note = Nucleotide attached to N-acetylgalactosamine
  modified_base 25: mod_base = OTHER; note = 2'-fluoro modified nucleotide
  modified_base 74: mod_base = OTHER; note = Nucleotide with phosphorothioate linkage
  modified_base 75: mod_base = OTHER; note = 2'-O-methyl modified nucleotide

SEQ ID NO: 700 - RNA, 76 nt, synthetic construct; identical to SEQ ID NO: 622
  source 1..76: mol_type = other RNA
  modified_base 1: mod_base = OTHER; note = 2'-O-methyl modified nucleotide with phosphorothioate linkage
  modified_base 2: mod_base = OTHER; note = 2'-O-methyl modified nucleotide with phosphorothioate linkage
  modified_base 13: mod_base = OTHER; note = 2'-fluoro modified nucleotide
  modified_base 14: mod_base = OTHER; note = 2'-fluoro modified nucleotide
  modified_base 20: mod_base = OTHER; note = Nucleotide attached to N-acetylgalactosamine
  modified_base 54: mod_base = OTHER; note = 2'-fluoro modified nucleotide
  modified_base 59: mod_base = OTHER; note = 2'-O-methyl modified nucleotide
  modified_base 75: mod_base = OTHER; note = Nucleotide with phosphorothioate linkage
  modified_base 76: mod_base = OTHER; note = 2'-O-methyl modified nucleotide

SEQ ID NO: 701 - RNA, 76 nt, synthetic construct; identical to SEQ ID NO: 622
  source 1..76: mol_type = other RNA
  modified_base 1: mod_base = OTHER; note = 2'-O-methyl modified nucleotide with phosphorothioate linkage
  modified_base 2: mod_base = OTHER; note = 2'-O-methyl modified nucleotide
  modified_base 20: mod_base = OTHER; note = Nucleotide attached to N-acetylgalactosamine
  modified_base 73: mod_base = OTHER; note = Nucleotide with phosphorothioate linkage
  modified_base 74: mod_base = OTHER; note = Nucleotide with phosphorothioate linkage
  modified_base 75: mod_base = OTHER; note = 2'-O-methyl modified nucleotide

SEQ ID NO: 702 - DNA, 76 bp, synthetic construct; identical to SEQ ID NO: 658
  source 1..76: mol_type = other DNA
  modified_base 1: mod_base = OTHER; note = 2'-O-methyl modified nucleotide with phosphorothioate linkage
  modified_base 2: mod_base = OTHER; note = 2'-O-methyl modified nucleotide with phosphorothioate linkage
  modified_base 20: mod_base = OTHER; note = Nucleotide attached to N-acetylgalactosamine
  modified_base 52: mod_base = OTHER; note = 2'-O-methyl modified nucleotide
  modified_base 63: mod_base = OTHER; note = Nucleotide with phosphorothioate linkage
  modified_base 74: mod_base = OTHER; note = Nucleotide with phosphorothioate linkage
  modified_base 75: mod_base = OTHER; note = 2'-O-methyl modified nucleotide with phosphorothioate linkage
  modified_base 76: mod_base = OTHER; note = 2'-O-methyl modified nucleotide
  misc_feature 1..63: note = RNA
  misc_feature 64: note = DNA
  misc_feature 65..76: note = RNA

SEQ ID NO: 703 - RNA, 76 nt, synthetic construct; identical to SEQ ID NO: 622
  source 1..76: mol_type = other RNA
  modified_base 1: mod_base = OTHER; note = 2'-O-methyl modified nucleotide
  modified_base 17: mod_base = OTHER; note = 2'-O-methyl modified nucleotide
  modified_base 18: mod_base = OTHER; note = 2'-O-methyl modified nucleotide
  modified_base 47: mod_base = OTHER; note = Nucleotide attached to N-acetylgalactosamine
  modified_base 50: mod_base = OTHER; note = 2'-O-methyl modified nucleotide
  modified_base 52: mod_base = OTHER; note = 2'-O-methyl modified nucleotide
  modified_base 73: mod_base = OTHER; note = 2'-O-methyl modified nucleotide

SEQ ID NO: 704 - RNA, 76 nt, synthetic construct; identical to SEQ ID NO: 622
  source 1..76: mol_type = other RNA
  modified_base 1: mod_base = OTHER; note = 2'-O-methyl modified nucleotide with phosphorothioate linkage
  modified_base 2: mod_base = OTHER; note = 2'-O-methyl modified nucleotide with phosphorothioate linkage
  modified_base 43: mod_base = OTHER; note = Nucleotide with phosphorothioate linkage
  modified_base 47: mod_base = OTHER; note = Nucleotide attached to N-acetylgalactosamine
  modified_base 55: mod_base = OTHER; note = Nucleotide with phosphorothioate linkage
  modified_base 74: mod_base = OTHER; note = Nucleotide with phosphorothioate linkage
  modified_base 75: mod_base = OTHER; note = 2'-O-methyl modified nucleotide

SEQ ID NO: 705 - RNA, 76 nt, synthetic construct; identical to SEQ ID NO: 622
  source 1..76: mol_type = other RNA
  modified_base 1: mod_base = OTHER; note = 2'-O-methyl modified nucleotide with phosphorothioate linkage
  modified_base 2: mod_base = OTHER; note = 2'-O-methyl modified nucleotide with phosphorothioate linkage
  modified_base 47: mod_base = OTHER; note = Nucleotide attached to N-acetylgalactosamine
  modified_base 74: mod_base = OTHER; note = Nucleotide with phosphorothioate linkage
  modified_base 75: mod_base = OTHER; note = 2'-O-methyl modified nucleotide

SEQ ID NO: 706 - DNA, 76 bp, synthetic construct; identical to SEQ ID NO: 658
  source 1..76: mol_type = other DNA
  modified_base 1: mod_base = OTHER; note = 2'-O-methyl modified nucleotide with phosphorothioate linkage
  modified_base 2: mod_base = OTHER; note = 2'-O-methyl modified nucleotide with phosphorothioate linkage
  modified_base 27: mod_base = OTHER; note = Nucleotide with phosphorothioate linkage
  modified_base 47: mod_base = OTHER; note = Nucleotide attached to N-acetylgalactosamine
  modified_base 51: mod_base = OTHER; note = Nucleotide with phosphorothioate linkage
  modified_base 59: mod_base = OTHER; note = 2'-fluoro modified nucleotide
  modified_base 74: mod_base = OTHER; note = Nucleotide with phosphorothioate linkage
  modified_base 75: mod_base = OTHER; note = 2'-O-methyl modified nucleotide
  misc_feature 1..51: note = RNA
  misc_feature 52: note = DNA
  misc_feature 53..76: note = RNA

SEQ ID NO: 707 - RNA, 76 nt, synthetic construct; identical to SEQ ID NO: 622
  source 1..76: mol_type = other RNA
  modified_base 1: mod_base = OTHER; note = 2'-O-methyl modified nucleotide with phosphorothioate linkage
  modified_base 2: mod_base = OTHER; note = 2'-O-methyl modified nucleotide with phosphorothioate linkage
  modified_base 13: mod_base = OTHER; note = 2'-fluoro modified nucleotide
  modified_base 14: mod_base = OTHER; note = 2'-fluoro modified nucleotide
  modified_base 47: mod_base = OTHER; note = Nucleotide attached to N-acetylgalactosamine
  modified_base 54: mod_base = OTHER; note = 2'-fluoro modified nucleotide
  modified_base 59: mod_base = OTHER; note = 2'-O-methyl modified nucleotide
  modified_base 73: mod_base = OTHER; note = Nucleotide with phosphorothioate linkage
  modified_base 75: mod_base = OTHER; note = Nucleotide with phosphorothioate linkage
  modified_base 76: mod_base = OTHER; note = 2'-O-methyl modified nucleotide

SEQ ID NO: 708 - RNA, 76 nt, synthetic construct; identical to SEQ ID NO: 622
  source 1..76: mol_type = other RNA
  modified_base 1: mod_base = OTHER; note = 2'-O-methyl modified nucleotide with phosphorothioate linkage
  modified_base 2: mod_base = OTHER; note = 2'-O-methyl modified nucleotide with phosphorothioate linkage
  modified_base 45: mod_base = OTHER; note = 2'-fluoro modified nucleotide
  modified_base 47: mod_base = OTHER; note = Nucleotide attached to N-acetylgalactosamine
  modified_base 57: mod_base = OTHER; note = 2'-fluoro modified nucleotide
  modified_base 68: mod_base = OTHER; note = 2'-fluoro modified nucleotide
  modified_base 74: mod_base = OTHER; note = Nucleotide with phosphorothioate linkage
  modified_base 75: mod_base = OTHER; note = 2'-O-methyl modified nucleotide with phosphorothioate linkage
  modified_base 76: mod_base = OTHER; note = 2'-O-methyl modified nucleotide

SEQ ID NO: 709 - RNA, 76 nt, synthetic construct; identical to SEQ ID NO: 622
  source 1..76: mol_type = other RNA
  modified_base 1: mod_base = OTHER; note = 2'-O-methyl modified nucleotide with phosphorothioate linkage
  modified_base 2: mod_base = OTHER; note = 2'-O-methyl modified nucleotide
  modified_base 47: mod_base = OTHER; note = Nucleotide attached to N-acetylgalactosamine
  modified_base 74: mod_base = OTHER; note = Nucleotide with phosphorothioate linkage
  modified_base 75: mod_base = OTHER; note = 2'-O-methyl modified nucleotide

SEQ ID NO: 710 - DNA, 76 bp, synthetic construct; identical to SEQ ID NO: 658
  source 1..76: mol_type = other DNA
  modified_base 1: mod_base = OTHER; note = 2'-O-methyl modified nucleotide with phosphorothioate linkage
  modified_base 2: mod_base = OTHER; note = 2'-O-methyl modified nucleotide with phosphorothioate linkage
  modified_base 27: mod_base = OTHER; note = Nucleotide with phosphorothioate linkage
  modified_base 47: mod_base = OTHER; note = Nucleotide attached to N-acetylgalactosamine
  modified_base 51: mod_base = OTHER; note = Nucleotide with phosphorothioate linkage
  modified_base 59: mod_base = OTHER; note = 2'-fluoro modified nucleotide
  modified_base 73: mod_base = OTHER; note = Nucleotide with phosphorothioate linkage
  modified_base 74: mod_base = OTHER; note = Nucleotide with phosphorothioate linkage
  modified_base 75: mod_base = OTHER; note = 2'-O-methyl modified nucleotide
  misc_feature 1..51: note = RNA
  misc_feature 52: note = DNA
  misc_feature 53..76: note = RNA

SEQ ID NO: 711 - RNA, 76 nt, synthetic construct; identical to SEQ ID NO: 622
  source 1..76: mol_type = other RNA
  modified_base 1: mod_base = OTHER; note = 2'-O-methyl modified nucleotide with phosphorothioate linkage
  modified_base 2: mod_base = OTHER; note = 2'-O-methyl modified nucleotide
  modified_base 25: mod_base = OTHER; note = 2'-fluoro modified nucleotide
  modified_base 47: mod_base = OTHER; note = Nucleotide attached to N-acetylgalactosamine
  modified_base 74: mod_base = OTHER; note = Nucleotide with phosphorothioate linkage
  modified_base 75: mod_base = OTHER; note = 2'-O-methyl modified nucleotide

SEQ ID NO: 712 - RNA, 76 nt, synthetic construct; identical to SEQ ID NO: 622
  source 1..76: mol_type = other RNA
  modified_base 1: mod_base = OTHER; note = 2'-O-methyl modified nucleotide with phosphorothioate linkage
  modified_base 2: mod_base = OTHER; note = 2'-O-methyl modified nucleotide with phosphorothioate linkage
  modified_base 13: mod_base = OTHER; note = 2'-fluoro modified nucleotide
  modified_base 14: mod_base = OTHER; note = 2'-fluoro modified nucleotide
  modified_base 47: mod_base = OTHER; note = Nucleotide attached to N-acetylgalactosamine
  modified_base 54: mod_base = OTHER; note = 2'-fluoro modified nucleotide
  modified_base 59: mod_base = OTHER; note = 2'-O-methyl modified nucleotide
  modified_base 75: mod_base = OTHER; note = Nucleotide with phosphorothioate linkage
  modified_base 76: mod_base = OTHER; note = 2'-O-methyl modified nucleotide

SEQ ID NO: 713 - RNA, 76 nt, synthetic construct; identical to SEQ ID NO: 622
  source 1..76: mol_type = other RNA
  modified_base 1: mod_base = OTHER; note = 2'-O-methyl modified nucleotide with phosphorothioate linkage
  modified_base 2: mod_base = OTHER; note = 2'-O-methyl modified nucleotide
  modified_base 47: mod_base = OTHER; note = Nucleotide attached to N-acetylgalactosamine
  modified_base 73: mod_base = OTHER; note = Nucleotide with phosphorothioate linkage
  modified_base 74: mod_base = OTHER; note = Nucleotide with phosphorothioate linkage
  modified_base 75: mod_base = OTHER; note = 2'-O-methyl modified nucleotide

SEQ ID NO: 714 - DNA, 76 bp, synthetic construct; identical to SEQ ID NO: 658
  source 1..76: mol_type = other DNA
  modified_base 1: mod_base = OTHER; note = 2'-O-methyl modified nucleotide with phosphorothioate linkage
  modified_base 2: mod_base = OTHER; note = 2'-O-methyl modified nucleotide with phosphorothioate linkage
  modified_base 47: mod_base = OTHER; note = Nucleotide attached to N-acetylgalactosamine
  modified_base 52: mod_base = OTHER; note = 2'-O-methyl modified nucleotide
  modified_base 63: mod_base = OTHER; note = Nucleotide with phosphorothioate linkage
  modified_base 74: mod_base = OTHER; note = Nucleotide with phosphorothioate linkage
  modified_base 75: mod_base = OTHER; note = 2'-O-methyl modified nucleotide with phosphorothioate linkage
  modified_base 76: mod_base = OTHER; note = 2'-O-methyl modified nucleotide
  misc_feature 1..63: note = RNA
  misc_feature 64: note = DNA
  misc_feature 65..76: note = RNA

SEQ ID NO: 715 - RNA, 76 nt, synthetic construct; identical to SEQ ID NO: 622
  source 1..76: mol_type = other RNA
  modified_base 1: mod_base = OTHER; note = 2'-O-methyl modified nucleotide attached to cyanine3 dye
  modified_base 16: mod_base = OTHER; note = Nucleotide attached to N-acetylgalactosamine
  modified_base 17: mod_base = OTHER; note = 2'-O-methyl modified nucleotide
  modified_base 18: mod_base = OTHER; note = 2'-O-methyl modified nucleotide
  modified_base 50: mod_base = OTHER; note = 2'-O-methyl modified nucleotide
  modified_base 52: mod_base = OTHER; note = 2'-O-methyl modified nucleotide
  modified_base 73: mod_base = OTHER; note = 2'-O-methyl modified nucleotide

SEQ ID NO: 716 - RNA, 76 nt, synthetic construct; identical to SEQ ID NO: 622
  source 1..76: mol_type = other RNA
  modified_base 1: mod_base = OTHER; note = 2'-O-methyl modified nucleotide with phosphorothioate linkage attached to cyanine3 dye
  modified_base 2: mod_base = OTHER; note = 2'-O-methyl modified nucleotide with phosphorothioate linkage
  modified_base 16: mod_base = OTHER; note = Nucleotide attached to N-acetylgalactosamine
  modified_base 43: mod_base = OTHER; note = Nucleotide with phosphorothioate linkage
  modified_base 55: mod_base = OTHER; note = Nucleotide with phosphorothioate linkage
  modified_base 74: mod_base = OTHER; note = Nucleotide with phosphorothioate linkage
  modified_base 75: mod_base = OTHER; note = 2'-O-methyl modified nucleotide

SEQ ID NO: 717 - RNA, 76 nt, synthetic construct; identical to SEQ ID NO: 622
  source 1..76: mol_type = other RNA
  modified_base 1: mod_base = OTHER; note = 2'-O-methyl modified nucleotide with phosphorothioate linkage attached to cyanine3 dye
  modified_base 2: mod_base = OTHER; note = 2'-O-methyl modified nucleotide with phosphorothioate linkage
  modified_base 16: mod_base = OTHER; note = Nucleotide attached to N-acetylgalactosamine
  modified_base 74: mod_base = OTHER; note = Nucleotide with phosphorothioate linkage
  modified_base 75: mod_base = OTHER; note = 2'-O-methyl modified nucleotide

SEQ ID NO: 718 - DNA, 76 bp, synthetic construct; identical to SEQ ID NO: 658
  source 1..76: mol_type = other DNA
  modified_base 1: mod_base = OTHER; note = 2'-O-methyl modified nucleotide with phosphorothioate linkage attached to cyanine3 dye
  modified_base 2: mod_base = OTHER; note = 2'-O-methyl modified nucleotide with phosphorothioate linkage
  modified_base 16: mod_base = OTHER; note = Nucleotide attached to N-acetylgalactosamine
  modified_base 27: mod_base = OTHER; note = Nucleotide with phosphorothioate linkage
  modified_base 51: mod_base = OTHER; note = Nucleotide with phosphorothioate linkage
  modified_base 59: mod_base = OTHER; note = 2'-fluoro modified nucleotide
  modified_base 74: mod_base = OTHER; note = Nucleotide with phosphorothioate linkage
  modified_base 75: mod_base = OTHER; note = 2'-O-methyl modified nucleotide
  misc_feature 1..51: note = RNA
  misc_feature 52: note = DNA
  misc_feature 53..76: note = RNA

SEQ ID NO: 719 - RNA, 76 nt, synthetic construct; identical to SEQ ID NO: 622
  source 1..76: mol_type = other RNA
  modified_base 1: mod_base = OTHER; note = 2'-O-methyl modified nucleotide with phosphorothioate linkage attached to cyanine3 dye
  modified_base 2: mod_base = OTHER; note = 2'-O-methyl modified nucleotide with phosphorothioate linkage
  modified_base 13: mod_base = OTHER; note = 2'-fluoro modified nucleotide
  modified_base 14: mod_base = OTHER; note = 2'-fluoro modified nucleotide
  modified_base 16: mod_base = OTHER; note = Nucleotide attached to N-acetylgalactosamine
  modified_base 54: mod_base = OTHER; note = 2'-fluoro modified nucleotide
  modified_base 59: mod_base = OTHER; note = 2'-O-methyl modified nucleotide
  modified_base 73: mod_base = OTHER; note = Nucleotide with phosphorothioate linkage
  modified_base 75: mod_base = OTHER; note = Nucleotide with phosphorothioate linkage
  modified_base 76: mod_base = OTHER; note = 2'-O-methyl modified nucleotide

SEQ ID NO: 720 - RNA, 76 nt, synthetic construct; identical to SEQ ID NO: 622
  source 1..76: mol_type = other RNA
  modified_base 1: mod_base = OTHER; note = 2'-O-methyl modified nucleotide with phosphorothioate linkage attached to cyanine3 dye
  modified_base 2: mod_base = OTHER; note = 2'-O-methyl modified nucleotide with phosphorothioate linkage
  modified_base 16: mod_base = OTHER; note = Nucleotide attached to N-acetylgalactosamine
  modified_base 45: mod_base = OTHER; note = 2'-fluoro modified nucleotide
  modified_base 57: mod_base = OTHER; note = 2'-fluoro modified nucleotide
  modified_base 68: mod_base = OTHER; note = 2'-fluoro modified nucleotide
  modified_base 74: mod_base = OTHER; note = Nucleotide with phosphorothioate linkage
  modified_base 75: mod_base = OTHER; note = 2'-O-methyl modified nucleotide with phosphorothioate linkage
  modified_base 76: mod_base = OTHER; note = 2'-O-methyl modified nucleotide

SEQ ID NO: 721 - RNA, 76 nt, synthetic construct; identical to SEQ ID NO: 622
  source 1..76: mol_type = other RNA
  modified_base 1: mod_base = OTHER; note = 2'-O-methyl modified nucleotide with phosphorothioate linkage attached to cyanine3 dye
  modified_base 2: mod_base = OTHER; note = 2'-O-methyl modified nucleotide
  modified_base 16: mod_base = OTHER; note = Nucleotide attached to N-acetylgalactosamine
  modified_base 74: mod_base = OTHER; note = Nucleotide with phosphorothioate linkage
  modified_base 75: mod_base = OTHER; note = 2'-O-methyl modified nucleotide

SEQ ID NO: 722 - DNA, 76 bp, synthetic construct; identical to SEQ ID NO: 658
  source 1..76: mol_type = other DNA
  modified_base 1: mod_base = OTHER; note = 2'-O-methyl modified nucleotide with phosphorothioate linkage attached to cyanine3 dye
  modified_base 2: mod_base = OTHER; note = 2'-O-methyl modified nucleotide with phosphorothioate linkage
  modified_base 16: mod_base = OTHER; note = Nucleotide attached to N-acetylgalactosamine
  modified_base 27: mod_base = OTHER; note = Nucleotide with phosphorothioate linkage
  modified_base 51: mod_base = OTHER; note = Nucleotide with phosphorothioate linkage
  modified_base 59: mod_base = OTHER; note = 2'-fluoro modified nucleotide
  modified_base 73: mod_base = OTHER; note = Nucleotide with phosphorothioate linkage
  modified_base 74: mod_base = OTHER; note = Nucleotide with phosphorothioate linkage
  modified_base 75: mod_base = OTHER; note = 2'-O-methyl modified nucleotide
  misc_feature 1..51: note = RNA
  misc_feature 52: note = DNA
  misc_feature 53..76: note = RNA

SEQ ID NO: 723 - RNA, 76 nt, synthetic construct; identical to SEQ ID NO: 622
  source 1..76: mol_type = other RNA
  modified_base 1: mod_base = OTHER; note = 2'-O-methyl modified nucleotide with phosphorothioate linkage attached to cyanine3 dye
  modified_base 2: mod_base = OTHER; note = 2'-O-methyl modified nucleotide
  modified_base 16: mod_base = OTHER; note = Nucleotide attached to N-acetylgalactosamine
  modified_base 25: mod_base = OTHER; note = 2'-fluoro modified nucleotide
  modified_base 74: mod_base = OTHER; note = Nucleotide with phosphorothioate linkage
  modified_base 75: mod_base = OTHER; note = 2'-O-methyl modified nucleotide

SEQ ID NO: 724 - RNA, 76 nt, synthetic construct; identical to SEQ ID NO: 622
  source 1..76: mol_type = other RNA
  modified_base 1: mod_base = OTHER; note = 2'-O-methyl modified nucleotide with phosphorothioate linkage attached to cyanine3 dye
  modified_base 2: mod_base = OTHER; note = 2'-O-methyl modified nucleotide with phosphorothioate linkage
  modified_base 13: mod_base = OTHER; note = 2'-fluoro modified nucleotide
  modified_base 14: mod_base = OTHER; note = 2'-fluoro modified nucleotide
  modified_base 16: mod_base = OTHER; note = Nucleotide attached to N-acetylgalactosamine
  modified_base 54: mod_base = OTHER; note = 2'-fluoro modified nucleotide
  modified_base 59: mod_base = OTHER; note = 2'-O-methyl modified nucleotide
  modified_base 75: mod_base = OTHER; note = Nucleotide with phosphorothioate linkage
  modified_base 76: mod_base = OTHER; note = 2'-O-methyl modified nucleotide

SEQ ID NO: 725 - RNA, 76 nt, synthetic construct; identical to SEQ ID NO: 622
  source 1..76: mol_type = other RNA
  modified_base 1: mod_base = OTHER; note = 2'-O-methyl modified nucleotide with phosphorothioate linkage attached to cyanine3 dye
  modified_base 2: mod_base = OTHER; note = 2'-O-methyl modified nucleotide
  modified_base 16: mod_base = OTHER; note = Nucleotide attached to N-acetylgalactosamine
  modified_base 73: mod_base = OTHER; note = Nucleotide with phosphorothioate linkage
  modified_base 74: mod_base = OTHER; note = Nucleotide with phosphorothioate linkage
  modified_base 75: mod_base = OTHER; note = 2'-O-methyl modified nucleotide

SEQ ID NO: 726 - DNA, 76 bp, synthetic construct; identical to SEQ ID NO: 658
  source 1..76: mol_type = other DNA
  modified_base 1: mod_base = OTHER; note = 2'-O-methyl modified nucleotide with phosphorothioate linkage attached to cyanine3 dye
  modified_base 2: mod_base = OTHER; note = 2'-O-methyl modified nucleotide with phosphorothioate linkage
  modified_base 16: mod_base = OTHER; note = Nucleotide attached to N-acetylgalactosamine
  modified_base 52: mod_base = OTHER; note = 2'-O-methyl modified nucleotide
  modified_base 63: mod_base = OTHER; note = Nucleotide with phosphorothioate linkage
  modified_base 74: mod_base = OTHER; note = Nucleotide with phosphorothioate linkage
  modified_base 75: mod_base = OTHER; note = 2'-O-methyl modified nucleotide with phosphorothioate linkage
  modified_base 76: mod_base = OTHER; note = 2'-O-methyl modified nucleotide
  misc_feature 1..63: note = RNA
  misc_feature 64: note = DNA
  misc_feature 65..76: note = RNA

SEQ ID NO: 727 - RNA, 76 nt, synthetic construct; identical to SEQ ID NO: 622
  source 1..76: mol_type = other RNA
  modified_base 1: mod_base = OTHER; note = 2'-O-methyl modified nucleotide attached to cyanine3 dye
  modified_base 17: mod_base = OTHER; note = 2'-O-methyl modified nucleotide
  modified_base 18: mod_base = OTHER; note = 2'-O-methyl modified nucleotide
  modified_base 20: mod_base = OTHER; note = Nucleotide attached to N-acetylgalactosamine
  modified_base 50: mod_base = OTHER; note = 2'-O-methyl modified nucleotide
  modified_base 52: mod_base = OTHER; note = 2'-O-methyl modified nucleotide
  modified_base 73: mod_base = OTHER; note = 2'-O-methyl modified nucleotide

SEQ ID NO: 728 - RNA, 76 nt, synthetic construct; identical to SEQ ID NO: 622
  source 1..76: mol_type = other RNA
  modified_base 1: mod_base = OTHER; note = 2'-O-methyl modified nucleotide with phosphorothioate linkage attached to cyanine3 dye
  modified_base 2: mod_base = OTHER; note = 2'-O-methyl modified nucleotide with phosphorothioate linkage
  modified_base 20: mod_base = OTHER; note = Nucleotide attached to N-acetylgalactosamine
  modified_base 43: mod_base = OTHER; note = Nucleotide with phosphorothioate linkage
  modified_base 55: mod_base = OTHER; note = Nucleotide with phosphorothioate linkage
  modified_base 74: mod_base = OTHER; note = Nucleotide with phosphorothioate linkage
  modified_base 75: mod_base = OTHER; note = 2'-O-methyl modified nucleotide

SEQ ID NO: 729 - RNA, 76 nt, synthetic construct; identical to SEQ ID NO: 622
  source 1..76: mol_type = other RNA
  modified_base 1: mod_base = OTHER; note = 2'-O-methyl modified nucleotide with phosphorothioate linkage attached to cyanine3 dye
  modified_base 2: mod_base = OTHER; note = 2'-O-methyl modified nucleotide with phosphorothioate linkage
  modified_base 20: mod_base = OTHER; note = Nucleotide attached to N-acetylgalactosamine
  modified_base 74: mod_base = OTHER; note = Nucleotide with phosphorothioate linkage
  modified_base 75: mod_base = OTHER; note = 2'-O-methyl modified nucleotide

SEQ ID NO: 730 - DNA, 76 bp, synthetic construct; identical to SEQ ID NO: 658
  source 1..76: mol_type = other DNA
  modified_base 1: mod_base = OTHER; note = 2'-O-methyl modified nucleotide with phosphorothioate linkage attached to cyanine3 dye
  modified_base 2: mod_base = OTHER; note = 2'-O-methyl modified nucleotide with phosphorothioate linkage
  modified_base 20: mod_base = OTHER; note = Nucleotide attached to N-acetylgalactosamine
  modified_base 27: mod_base = OTHER; note = Nucleotide with phosphorothioate linkage
  modified_base 51: mod_base = OTHER; note = Nucleotide with phosphorothioate linkage
  modified_base 59: mod_base = OTHER; note = 2'-fluoro modified nucleotide
  modified_base 74: mod_base = OTHER; note = Nucleotide with phosphorothioate linkage
  modified_base 75: mod_base = OTHER; note = 2'-O-methyl modified nucleotide
  misc_feature 1..51: note = RNA
  misc_feature 52: note = DNA
  misc_feature 53..76: note = RNA

SEQ ID NO: 731 - RNA, 76 nt, synthetic construct; identical to SEQ ID NO: 622
  source 1..76: mol_type = other RNA
  modified_base 1: mod_base = OTHER; note = 2'-O-methyl modified nucleotide with phosphorothioate linkage attached to cyanine3 dye
  modified_base 2: mod_base = OTHER; note = 2'-O-methyl modified nucleotide with phosphorothioate linkage
  modified_base 13: mod_base = OTHER; note = 2'-fluoro modified nucleotide
  modified_base 14: mod_base = OTHER; note = 2'-fluoro modified nucleotide
  modified_base 20: mod_base = OTHER; note = Nucleotide attached to N-acetylgalactosamine
  modified_base 54: mod_base = OTHER; note = 2'-fluoro modified nucleotide
  modified_base 59: mod_base = OTHER; note = 2'-O-methyl modified nucleotide
  modified_base 73: mod_base = OTHER; note = Nucleotide with phosphorothioate linkage
  modified_base 75: mod_base = OTHER; note = Nucleotide with phosphorothioate linkage
  modified_base 76: mod_base = OTHER; note = 2'-O-methyl modified nucleotide

SEQ ID NO: 732 - RNA, 76 nt, synthetic construct; identical to SEQ ID NO: 622
  source 1..76: mol_type = other RNA
  modified_base 1: mod_base = OTHER; note = 2'-O-methyl modified nucleotide with phosphorothioate linkage attached to cyanine3 dye
  modified_base 2: mod_base = OTHER; note = 2'-O-methyl modified nucleotide with phosphorothioate linkage
  modified_base 20: mod_base = OTHER; note = Nucleotide attached to N-acetylgalactosamine
  modified_base 45: mod_base = OTHER; note = 2'-fluoro modified nucleotide
  modified_base 57: mod_base = OTHER; note = 2'-fluoro modified nucleotide
  modified_base 68: mod_base = OTHER; note = 2'-fluoro modified nucleotide
  modified_base 74: mod_base = OTHER; note = Nucleotide with phosphorothioate linkage
  modified_base 75: mod_base = OTHER; note = 2'-O-methyl modified nucleotide with phosphorothioate linkage
  modified_base 76: mod_base = OTHER; note = 2'-O-methyl modified nucleotide

SEQ ID NO: 733 - RNA, 76 nt, synthetic construct; identical to SEQ ID NO: 622
  source 1..76: mol_type = other RNA
  modified_base 1: mod_base = OTHER; note = 2'-O-methyl modified nucleotide with phosphorothioate linkage attached to cyanine3 dye
  modified_base 2: mod_base = OTHER; note = 2'-O-methyl modified nucleotide
  modified_base 20: mod_base = OTHER; note = Nucleotide attached to N-acetylgalactosamine
  modified_base 74: mod_base = OTHER; note = Nucleotide with phosphorothioate linkage
  modified_base 75: mod_base = OTHER; note = 2'-O-methyl modified nucleotide

SEQ ID NO: 734 - DNA, 76 bp, synthetic construct; identical to SEQ ID NO: 658
  source 1..76: mol_type = other DNA
  modified_base 1: mod_base = OTHER; note = 2'-O-methyl modified nucleotide with phosphorothioate linkage attached to cyanine3 dye
  modified_base 2: mod_base = OTHER; note = 2'-O-methyl modified nucleotide with phosphorothioate linkage
  modified_base 20: mod_base = OTHER; note = Nucleotide attached to N-acetylgalactosamine
  modified_base 27: mod_base = OTHER; note = Nucleotide with phosphorothioate linkage
  modified_base 51: mod_base = OTHER; note = Nucleotide with phosphorothioate linkage
  modified_base 59: mod_base = OTHER; note = 2'-fluoro modified nucleotide
  modified_base 73: mod_base = OTHER; note = Nucleotide with phosphorothioate linkage
  modified_base 74: mod_base = OTHER; note = Nucleotide with phosphorothioate linkage
  modified_base 75: mod_base = OTHER; note = 2'-O-methyl modified nucleotide
  misc_feature 1..51: note = RNA
  misc_feature 52: note = DNA
  misc_feature 53..76: note = RNA

SEQ ID NO: 735 - RNA, 76 nt, synthetic construct; identical to SEQ ID NO: 622
  source 1..76: mol_type = other RNA
  modified_base 1: mod_base = OTHER; note = 2'-O-methyl modified nucleotide with phosphorothioate linkage attached to cyanine3 dye
  modified_base 2: mod_base = OTHER; note = 2'-O-methyl modified nucleotide
  modified_base 20: mod_base = OTHER; note = Nucleotide attached to N-acetylgalactosamine
  modified_base 25: mod_base = OTHER; note = 2'-fluoro modified nucleotide
  modified_base 74: mod_base = OTHER; note = Nucleotide with phosphorothioate linkage
  modified_base 75: mod_base = OTHER; note = 2'-O-methyl modified nucleotide

SEQ ID NO: 736 - RNA, 76 nt, synthetic construct; identical to SEQ ID NO: 622
  source 1..76: mol_type = other RNA
  modified_base 1: mod_base = OTHER; note = 2'-O-methyl modified nucleotide with phosphorothioate linkage attached to cyanine3 dye
  modified_base 2: mod_base = OTHER; note = 2'-O-methyl modified nucleotide with phosphorothioate linkage
  modified_base 13: mod_base = OTHER; note = 2'-fluoro modified nucleotide
  modified_base 14: mod_base = OTHER; note = 2'-fluoro modified nucleotide
  modified_base 20: mod_base = OTHER; note = Nucleotide attached to N-acetylgalactosamine
  modified_base 54: mod_base = OTHER; note = 2'-fluoro modified nucleotide
  modified_base 59: mod_base = OTHER; note = 2'-O-methyl modified nucleotide
  modified_base 75: mod_base = OTHER; note = Nucleotide with phosphorothioate linkage
  modified_base 76: mod_base = OTHER; note = 2'-O-methyl modified nucleotide

SEQ ID NO: 737 - RNA, 76 nt, synthetic construct; identical to SEQ ID NO: 622
  source 1..76: mol_type = other RNA
  modified_base 1: mod_base = OTHER; note = 2'-O-methyl modified nucleotide with phosphorothioate linkage attached to cyanine3 dye
  modified_base 2: mod_base = OTHER; note = 2'-O-methyl modified nucleotide
  modified_base 20: mod_base = OTHER; note = Nucleotide attached to N-acetylgalactosamine
  modified_base 73: mod_base = OTHER; note = Nucleotide with phosphorothioate linkage
  modified_base 74: mod_base = OTHER; note = Nucleotide with phosphorothioate linkage
  modified_base 75: mod_base = OTHER; note = 2'-O-methyl modified nucleotide

SEQ ID NO: 738 - DNA, 76 bp, synthetic construct; identical to SEQ ID NO: 658
  source 1..76: mol_type = other DNA
  modified_base 1: mod_base = OTHER; note = 2'-O-methyl modified nucleotide with phosphorothioate linkage attached to cyanine3 dye
  modified_base 2: mod_base = OTHER; note = 2'-O-methyl modified nucleotide with phosphorothioate linkage
  modified_base 20: mod_base = OTHER; note = Nucleotide attached to N-acetylgalactosamine
  modified_base 52: mod_base = OTHER; note = 2'-O-methyl modified nucleotide
  modified_base 63: mod_base = OTHER; note = Nucleotide with phosphorothioate linkage
  modified_base 74: mod_base = OTHER; note = Nucleotide with phosphorothioate linkage
  modified_base 75: mod_base = OTHER; note = 2'-O-methyl modified nucleotide with phosphorothioate linkage
  modified_base 76: mod_base = OTHER; note = 2'-O-methyl modified nucleotide
  misc_feature 1..63: note = RNA
  misc_feature 64: note = DNA
  misc_feature 65..76: note = RNA

SEQ ID NO: 739 - RNA, 76 nt, synthetic construct; identical to SEQ ID NO: 622
  source 1..76: mol_type = other RNA
  modified_base 1: mod_base = OTHER; note = 2'-O-methyl modified nucleotide attached to cyanine3 dye
  modified_base 17: mod_base = OTHER; note = 2'-O-methyl modified nucleotide
  modified_base 18: mod_base = OTHER; note = 2'-O-methyl modified nucleotide
  modified_base 47: mod_base = OTHER; note = Nucleotide attached to N-acetylgalactosamine
  modified_base 50: mod_base = OTHER; note = 2'-O-methyl modified nucleotide
  modified_base 52: mod_base = OTHER; note = 2'-O-methyl modified nucleotide
  modified_base 73: mod_base = OTHER; note = 2'-O-methyl modified nucleotide

SEQ ID NO: 740 - RNA, 76 nt, synthetic construct; identical to SEQ ID NO: 622
  source 1..76: mol_type = other RNA
  modified_base 1: mod_base = OTHER; note = 2'-O-methyl modified nucleotide with phosphorothioate linkage attached to cyanine3 dye
  modified_base 2: mod_base = OTHER; note = 2'-O-methyl modified nucleotide with phosphorothioate linkage
  modified_base 43: mod_base = OTHER; note = Nucleotide with phosphorothioate linkage
  modified_base 47: mod_base = OTHER; note = Nucleotide attached to N-acetylgalactosamine
  modified_base 55: mod_base = OTHER; note = Nucleotide with phosphorothioate linkage
  modified_base 74: mod_base = OTHER; note = Nucleotide with phosphorothioate linkage
  modified_base 75: mod_base = OTHER; note = 2'-O-methyl modified nucleotide

SEQ ID NO: 741 - RNA, 76 nt, synthetic construct; identical to SEQ ID NO: 622
  source 1..76: mol_type = other RNA
  modified_base 1: mod_base = OTHER; note = 2'-O-methyl modified nucleotide with phosphorothioate linkage attached to cyanine3 dye
  modified_base 2: mod_base = OTHER; note = 2'-O-methyl modified nucleotide with phosphorothioate linkage
  modified_base 47: mod_base = OTHER; note = Nucleotide attached to N-acetylgalactosamine
  modified_base 74: mod_base = OTHER; note = Nucleotide with phosphorothioate linkage
  modified_base 75: mod_base = OTHER; note = 2'-O-methyl modified nucleotide

SEQ ID NO: 742 - DNA, 76 bp, synthetic construct; identical to SEQ ID NO: 658
  source 1..76: mol_type = other DNA
  modified_base 1: mod_base = OTHER; note = 2'-O-methyl modified nucleotide with phosphorothioate linkage attached to cyanine3 dye
  modified_base 2: mod_base = OTHER; note = 2'-O-methyl modified nucleotide with phosphorothioate linkage
  modified_base 27: mod_base = OTHER; note = Nucleotide with phosphorothioate linkage
  modified_base 47: mod_base = OTHER; note = Nucleotide attached to N-acetylgalactosamine
  modified_base 51: mod_base = OTHER; note = Nucleotide with phosphorothioate linkage
  modified_base 59: mod_base = OTHER; note = 2'-fluoro modified nucleotide
  modified_base 74: mod_base = OTHER; note = Nucleotide with phosphorothioate linkage
  modified_base 75: mod_base = OTHER; note = 2'-O-methyl modified nucleotide
  misc_feature 1..51: note = RNA
  misc_feature 52: note = DNA
  misc_feature 53..76: note = RNA

SEQ ID NO: 743 - RNA, 76 nt, synthetic construct; identical to SEQ ID NO: 622
  source 1..76: mol_type = other RNA
  modified_base 1: mod_base = OTHER; note = 2'-O-methyl modified nucleotide with phosphorothioate linkage attached to cyanine3 dye
  modified_base 2: mod_base = OTHER; note = 2'-O-methyl modified nucleotide with phosphorothioate linkage
  modified_base 13: mod_base = OTHER; note = 2'-fluoro modified nucleotide
  modified_base 14: mod_base = OTHER; note = 2'-fluoro modified nucleotide
  modified_base 47: mod_base = OTHER; note = Nucleotide attached to N-acetylgalactosamine
  modified_base 54: mod_base = OTHER; note = 2'-fluoro modified nucleotide
  modified_base 59: mod_base = OTHER; note = 2'-O-methyl modified nucleotide
  modified_base 73: mod_base = OTHER; note = Nucleotide with phosphorothioate linkage
  modified_base 75: mod_base = OTHER; note = Nucleotide with phosphorothioate linkage
  modified_base 76: mod_base = OTHER; note = 2'-O-methyl modified nucleotide

SEQ ID NO: 744 - RNA, 76 nt, synthetic construct; identical to SEQ ID NO: 622
  source 1..76: mol_type = other RNA
  modified_base 1: mod_base = OTHER; note = 2'-O-methyl modified nucleotide with phosphorothioate linkage attached to cyanine3 dye
  modified_base 2: mod_base = OTHER; note = 2'-O-methyl modified nucleotide with phosphorothioate linkage
  modified_base 45: mod_base = OTHER; note = 2'-fluoro modified nucleotide
  modified_base 47: mod_base = OTHER; note = Nucleotide attached to N-acetylgalactosamine
  modified_base 57: mod_base = OTHER; note = 2'-fluoro modified nucleotide
  modified_base 68: mod_base = OTHER; note = 2'-fluoro modified nucleotide
  modified_base 74: mod_base = OTHER; note = Nucleotide with phosphorothioate linkage
  modified_base 75: mod_base = OTHER; note = 2'-O-methyl modified nucleotide with phosphorothioate linkage
  modified_base 76: mod_base = OTHER; note = 2'-O-methyl modified nucleotide

SEQ ID NO: 745 - RNA, 76 nt, synthetic construct; identical to SEQ ID NO: 622
  source 1..76: mol_type = other RNA
  modified_base 1: mod_base = OTHER; note = 2'-O-methyl modified nucleotide with phosphorothioate linkage attached to cyanine3 dye
  modified_base 2: mod_base = OTHER; note = 2'-O-methyl modified nucleotide
  modified_base 47: mod_base = OTHER; note = Nucleotide attached to N-acetylgalactosamine
  modified_base 74: mod_base = OTHER; note = Nucleotide with phosphorothioate linkage
  modified_base 75: mod_base = OTHER; note = 2'-O-methyl modified nucleotide

SEQ ID NO: 746 - DNA, 76 bp, synthetic construct; identical to SEQ ID NO: 658
  source 1..76: mol_type = other DNA
  modified_base 1: mod_base = OTHER; note = 2'-O-methyl modified nucleotide with phosphorothioate linkage attached to cyanine3 dye
  modified_base 2: mod_base = OTHER; note = 2'-O-methyl modified nucleotide with phosphorothioate linkage
  modified_base 27: mod_base = OTHER; note = Nucleotide with phosphorothioate linkage
  modified_base 47: mod_base = OTHER; note = Nucleotide attached to N-acetylgalactosamine
  modified_base 51: mod_base = OTHER; note = Nucleotide with phosphorothioate linkage
  modified_base 59: mod_base = OTHER; note = 2'-fluoro modified nucleotide
  modified_base 73: mod_base = OTHER; note = Nucleotide with phosphorothioate linkage
  modified_base 74: mod_base = OTHER; note = Nucleotide with phosphorothioate linkage
  modified_base 75: mod_base = OTHER; note = 2'-O-methyl modified nucleotide
  misc_feature 1..51: note = RNA
  misc_feature 52: note = DNA
  misc_feature 53..76: note = RNA

SEQ ID NO: 747 - RNA, 76 nt, synthetic construct; identical to SEQ ID NO: 622
  source 1..76: mol_type = other RNA
  modified_base 1: mod_base = OTHER; note = 2'-O-methyl modified nucleotide with phosphorothioate linkage attached to cyanine3 dye
  modified_base 2: mod_base = OTHER; note = 2'-O-methyl modified nucleotide
  modified_base 25: mod_base = OTHER; note = 2'-fluoro modified nucleotide
  modified_base 47: mod_base = OTHER; note = Nucleotide attached to N-acetylgalactosamine
  modified_base 74: mod_base = OTHER; note = Nucleotide with phosphorothioate linkage
  modified_base 75: mod_base = OTHER; note = 2'-O-methyl modified nucleotide

SEQ ID NO: 748 - RNA, 76 nt, synthetic construct; identical to SEQ ID NO: 622
  source 1..76: mol_type = other RNA
  modified_base 1: mod_base = OTHER; note = 2'-O-methyl modified nucleotide with phosphorothioate linkage attached to cyanine3 dye
  modified_base 2: mod_base = OTHER; note = 2'-O-methyl modified nucleotide with phosphorothioate linkage
  modified_base 13: mod_base = OTHER; note = 2'-fluoro modified nucleotide
  modified_base 14: mod_base = OTHER; note = 2'-fluoro modified nucleotide
  modified_base 47: mod_base = OTHER; note = Nucleotide attached to N-acetylgalactosamine
  modified_base 54: mod_base = OTHER; note = 2'-fluoro modified nucleotide
  modified_base 59: mod_base = OTHER; note = 2'-O-methyl modified nucleotide
  modified_base 75: mod_base = OTHER; note = Nucleotide with phosphorothioate linkage
  modified_base 76: mod_base = OTHER; note = 2'-O-methyl modified nucleotide

SEQ ID NO: 749 - RNA, 76 nt, synthetic construct; identical to SEQ ID NO: 622
  source 1..76: mol_type = other RNA
  modified_base 1: mod_base = OTHER; note = 2'-O-methyl modified nucleotide with phosphorothioate linkage attached to cyanine3 dye
  modified_base 2: mod_base = OTHER; note = 2'-O-methyl modified nucleotide
  modified_base 47: mod_base = OTHER; note = Nucleotide attached to N-acetylgalactosamine
  modified_base 73: mod_base = OTHER; note = Nucleotide with phosphorothioate linkage
  modified_base 74: mod_base = OTHER; note = Nucleotide with phosphorothioate linkage
  modified_base 75: mod_base = OTHER; note = 2'-O-methyl modified nucleotide

SEQ ID NO: 750 - DNA, 76 bp, synthetic construct; identical to SEQ ID NO: 658
  source 1..76: mol_type = other DNA
  modified_base 1: mod_base = OTHER; note = 2'-O-methyl modified nucleotide with phosphorothioate linkage attached to cyanine3 dye
  modified_base 2: mod_base = OTHER; note = 2'-O-methyl modified nucleotide with phosphorothioate linkage
  modified_base 47: mod_base = OTHER; note = Nucleotide attached to N-acetylgalactosamine
  modified_base 52: mod_base = OTHER; note = 2'-O-methyl modified nucleotide
  modified_base 63: mod_base = OTHER; note = Nucleotide with phosphorothioate linkage
  modified_base 74: mod_base = OTHER; note = Nucleotide with phosphorothioate linkage
  modified_base 75: mod_base = OTHER; note = 2'-O-methyl modified nucleotide with phosphorothioate linkage
  modified_base 76: mod_base = OTHER; note = 2'-O-methyl modified nucleotide
  misc_feature 1..63: note = RNA
  misc_feature 64: note = DNA
  misc_feature 65..76: note = RNA

SEQ ID NO: 751 - RNA, 76 nt, synthetic construct; identical to SEQ ID NO: 622
  source 1..76: mol_type = other RNA
  modified_base 1: mod_base = OTHER; note = 2'-O-methyl modified nucleotide
  modified_base 16: mod_base = OTHER; note = Nucleotide attached to AN1 (C6-U phosphoramidite (5'-Dimethoxytrityl-5-[N-(trifluoroacetylaminohexyl)-3-acry limido]-Uridine, 2'-O-triisopropylsilyloxymethyl-3'-[(2-cyanoethyl)-(N,N-dii sopropyl)]-phosphoramidite))
  modified_base 17: mod_base = OTHER; note = 2'-O-methyl modified nucleotide
  modified_base 18: mod_base = OTHER; note = 2'-O-methyl modified nucleotide
  modified_base 50: mod_base = OTHER; note = 2'-O-methyl modified nucleotide
  modified_base 52: mod_base = OTHER; note = 2'-O-methyl modified nucleotide
  modified_base 73: mod_base = OTHER; note = 2'-O-methyl modified nucleotide

SEQ ID NO: 752 - RNA, 76 nt, synthetic construct; identical to SEQ ID NO: 622
  source 1..76: mol_type = other RNA
  modified_base 1: mod_base = OTHER; note = 2'-O-methyl modified nucleotide with phosphorothioate linkage
  modified_base 2: mod_base = OTHER; note = 2'-O-methyl modified nucleotide with phosphorothioate linkage
  modified_base 16: mod_base = OTHER; note = Nucleotide attached to AN1 (C6-U phosphoramidite (5'-Dimethoxytrityl-5-[N-(trifluoroacetylaminohexyl)-3-acry limido]-Uridine, 2'-O-triisopropylsilyloxymethyl-3'-[(2-cyanoethyl)-(N,N-dii sopropyl)]-phosphoramidite))
  modified_base 43: mod_base = OTHER; note = Nucleotide with phosphorothioate linkage
  modified_base 55: mod_base = OTHER; note = Nucleotide with phosphorothioate linkage
  modified_base 74: mod_base = OTHER; note = Nucleotide with phosphorothioate linkage
  modified_base 75: mod_base = OTHER; note = 2'-O-methyl modified nucleotide

SEQ ID NO: 753 - RNA, 76 nt, synthetic construct; identical to SEQ ID NO: 622
  source 1..76: mol_type = other RNA
  modified_base 1: mod_base = OTHER; note = 2'-O-methyl modified nucleotide with phosphorothioate linkage
  modified_base 2: mod_base = OTHER; note = 2'-O-methyl modified nucleotide with phosphorothioate linkage
  modified_base 16: mod_base = OTHER; note = Nucleotide attached to AN1 (C6-U phosphoramidite (5'-Dimethoxytrityl-5-[N-(trifluoroacetylaminohexyl)-3-acry limido]-Uridine, 2'-O-triisopropylsilyloxymethyl-3'-[(2-cyanoethyl)-(N,N-dii sopropyl)]-phosphoramidite))
  modified_base 74: mod_base = OTHER; note = Nucleotide with phosphorothioate linkage
  modified_base 75: mod_base = OTHER; note = 2'-O-methyl modified nucleotide

SEQ ID NO: 754 - DNA, 76 bp, synthetic construct; identical to SEQ ID NO: 658
  source 1..76: mol_type = other DNA
  modified_base 1: mod_base = OTHER; note = 2'-O-methyl modified nucleotide with phosphorothioate linkage
  modified_base 2: mod_base = OTHER; note = 2'-O-methyl modified nucleotide with phosphorothioate linkage
  modified_base 16: mod_base = OTHER; note = Nucleotide attached to AN1 (C6-U phosphoramidite (5'-Dimethoxytrityl-5-[N-(trifluoroacetylaminohexyl)-3-acry limido]-Uridine, 2'-O-triisopropylsilyloxymethyl-3'-[(2-cyanoethyl)-(N,N-dii sopropyl)]-phosphoramidite))
  modified_base 27: mod_base = OTHER; note = Nucleotide with phosphorothioate linkage
  modified_base 51: mod_base = OTHER; note = Nucleotide with phosphorothioate linkage
  modified_base 59: mod_base = OTHER; note = 2'-fluoro modified nucleotide
  modified_base 74: mod_base = OTHER; note = Nucleotide with phosphorothioate linkage
  modified_base 75: mod_base = OTHER; note = 2'-O-methyl modified nucleotide
  misc_feature 1..51: note = RNA
  misc_feature 52: note = DNA
  misc_feature 53..76: note = RNA

SEQ ID NO: 755 - RNA, 76 nt, synthetic construct; identical to SEQ ID NO: 622
  source 1..76: mol_type = other RNA
  modified_base 1: mod_base = OTHER; note = 2'-O-methyl modified nucleotide with phosphorothioate linkage
  modified_base 2: mod_base = OTHER; note = 2'-O-methyl modified nucleotide with phosphorothioate linkage
  modified_base 13: mod_base = OTHER; note = 2'-fluoro modified nucleotide
  modified_base 14: mod_base = OTHER; note = 2'-fluoro modified nucleotide
  modified_base 16: mod_base = OTHER; note = Nucleotide attached to AN1 (C6-U phosphoramidite (5'-Dimethoxytrityl-5-[N-(trifluoroacetylaminohexyl)-3-acry limido]-Uridine, 2'-O-triisopropylsilyloxymethyl-3'-[(2-cyanoethyl)-(N,N-dii sopropyl)]-phosphoramidite))
  modified_base 54: mod_base = OTHER; note = 2'-fluoro modified nucleotide
  modified_base 59: mod_base = OTHER; note = 2'-O-methyl modified nucleotide
  modified_base 73: mod_base = OTHER; note = Nucleotide with phosphorothioate linkage
  modified_base 75: mod_base = OTHER; note = Nucleotide with phosphorothioate linkage
  modified_base 76: mod_base = OTHER; note = 2'-O-methyl modified nucleotide

SEQ ID NO: 756 - RNA, 76 nt, synthetic construct; identical to SEQ ID NO: 622
  source 1..76: mol_type = other RNA
  modified_base 1: mod_base = OTHER; note = 2'-O-methyl modified nucleotide with phosphorothioate linkage
  modified_base 2: mod_base = OTHER; note = 2'-O-methyl modified nucleotide with phosphorothioate linkage
  modified_base 16: mod_base = OTHER; note = Nucleotide attached to AN1 (C6-U phosphoramidite (5'-Dimethoxytrityl-5-[N-(trifluoroacetylaminohexyl)-3-acry limido]-Uridine, 2'-O-triisopropylsilyloxymethyl-3'-[(2-cyanoethyl)-(N,N-dii sopropyl)]-phosphoramidite))
  modified_base 45: mod_base = OTHER; note = 2'-fluoro modified nucleotide
  modified_base 57: mod_base = OTHER; note = 2'-fluoro modified nucleotide
  modified_base 68: mod_base = OTHER; note = 2'-fluoro modified nucleotide
  modified_base 74: mod_base = OTHER; note = Nucleotide with phosphorothioate linkage
  modified_base 75: mod_base = OTHER; note = 2'-O-methyl modified nucleotide with phosphorothioate linkage
  modified_base 76: mod_base = OTHER; note = 2'-O-methyl modified nucleotide

SEQ ID NO: 757 - RNA, 76 nt, synthetic construct; identical to SEQ ID NO: 622
  source 1..76: mol_type = other RNA
  modified_base 1: mod_base = OTHER; note = 2'-O-methyl modified nucleotide with phosphorothioate linkage
  modified_base 2: mod_base = OTHER; note = 2'-O-methyl modified nucleotide
  modified_base 16: mod_base = OTHER; note = Nucleotide attached to AN1 (C6-U phosphoramidite (5'-Dimethoxytrityl-5-[N-(trifluoroacetylaminohexyl)-3-acry limido]-Uridine, 2'-O-triisopropylsilyloxymethyl-3'-[(2-cyanoethyl)-(N,N-dii sopropyl)]-phosphoramidite))
  modified_base 74: mod_base = OTHER; note = Nucleotide with phosphorothioate linkage
  modified_base 75: mod_base = OTHER; note = 2'-O-methyl modified nucleotide

SEQ ID NO: 758 - DNA, 76 bp, synthetic construct; identical to SEQ ID NO: 658
  source 1..76: mol_type = other DNA
  modified_base 1: mod_base = OTHER; note = 2'-O-methyl modified nucleotide with phosphorothioate linkage
  modified_base 2: mod_base = OTHER; note = 2'-O-methyl modified nucleotide with phosphorothioate linkage
  modified_base 16: mod_base = OTHER; note = Nucleotide attached to AN1 (C6-U phosphoramidite (5'-Dimethoxytrityl-5-[N-(trifluoroacetylaminohexyl)-3-acry limido]-Uridine, 2'-O-triisopropylsilyloxymethyl-3'-[(2-cyanoethyl)-(N,N-dii sopropyl)]-phosphoramidite))
  modified_base 27: mod_base = OTHER; note = Nucleotide with phosphorothioate linkage
  modified_base 51: mod_base = OTHER; note = Nucleotide with phosphorothioate linkage
  modified_base 59: mod_base = OTHER; note = 2'-fluoro modified nucleotide
  modified_base 73: mod_base = OTHER; note = Nucleotide with phosphorothioate linkage
  modified_base 74: mod_base = OTHER; note = Nucleotide with phosphorothioate linkage
  modified_base 75: mod_base = OTHER; note = 2'-O-methyl modified nucleotide
  misc_feature 1..51: note = RNA
  misc_feature 52: note = DNA
  misc_feature 53..76: note = RNA

SEQ ID NO: 759 - RNA, 76 nt, synthetic construct; identical to SEQ ID NO: 622
  source 1..76: mol_type = other RNA
  modified_base 1: mod_base = OTHER; note = 2'-O-methyl modified nucleotide with phosphorothioate linkage
  modified_base 2: mod_base = OTHER; note = 2'-O-methyl modified nucleotide
  modified_base 16: mod_base = OTHER; note = Nucleotide attached to AN1 (C6-U phosphoramidite (5'-Dimethoxytrityl-5-[N-(trifluoroacetylaminohexyl)-3-acry limido]-Uridine, 2'-O-triisopropylsilyloxymethyl-3'-[(2-cyanoethyl)-(N,N-dii sopropyl)]-phosphoramidite))
  modified_base 25: mod_base = OTHER; note = 2'-fluoro modified nucleotide
  modified_base 74: mod_base = OTHER; note = Nucleotide with phosphorothioate linkage
  modified_base 75: mod_base = OTHER; note = 2'-O-methyl modified nucleotide

SEQ ID NO: 760 - RNA, 76 nt, synthetic construct; identical to SEQ ID NO: 622
  source 1..76: mol_type = other RNA
  modified_base 1: mod_base = OTHER; note = 2'-O-methyl modified nucleotide with phosphorothioate linkage
  modified_base 2: mod_base = OTHER; note = 2'-O-methyl modified nucleotide with phosphorothioate linkage
  modified_base 13: mod_base = OTHER; note = 2'-fluoro modified nucleotide
  modified_base 14: mod_base = OTHER; note = 2'-fluoro modified nucleotide
  modified_base 16: mod_base = OTHER; note = Nucleotide attached to AN1 (C6-U phosphoramidite (5'-Dimethoxytrityl-5-[N-(trifluoroacetylaminohexyl)-3-acry limido]-Uridine, 2'-O-triisopropylsilyloxymethyl-3'-[(2-cyanoethyl)-(N,N-dii sopropyl)]-phosphoramidite))
  modified_base 54: mod_base = OTHER; note = 2'-fluoro modified nucleotide
  modified_base 59: mod_base = OTHER; note = 2'-O-methyl modified nucleotide
  modified_base 75: mod_base = OTHER; note = Nucleotide with phosphorothioate linkage
  modified_base 76: mod_base = OTHER; note = 2'-O-methyl modified nucleotide

SEQ ID NO: 761 - RNA, 76 nt, synthetic construct; identical to SEQ ID NO: 622
  source 1..76: mol_type = other RNA
  modified_base 1: mod_base = OTHER; note = 2'-O-methyl modified nucleotide with phosphorothioate linkage
  modified_base 2: mod_base = OTHER; note = 2'-O-methyl modified nucleotide
  modified_base 16: mod_base = OTHER; note = Nucleotide attached to AN1 (C6-U phosphoramidite (5'-Dimethoxytrityl-5-[N-(trifluoroacetylaminohexyl)-3-acry limido]-Uridine, 2'-O-triisopropylsilyloxymethyl-3'-[(2-cyanoethyl)-(N,N-dii sopropyl)]-phosphoramidite))
  modified_base 73: mod_base = OTHER; note = Nucleotide with phosphorothioate linkage
  modified_base 74: mod_base = OTHER; note = Nucleotide with phosphorothioate linkage
  modified_base 75: mod_base = OTHER; note = 2'-O-methyl modified nucleotide

SEQ ID NO: 762 - DNA, 76 bp, synthetic construct; identical to SEQ ID NO: 658
  source 1..76: mol_type = other DNA
  modified_base 1: mod_base = OTHER; note = 2'-O-methyl modified nucleotide with phosphorothioate linkage
  modified_base 2: mod_base = OTHER; note = 2'-O-methyl modified nucleotide with phosphorothioate linkage
  modified_base 16: mod_base = OTHER; note = Nucleotide attached to AN1 (C6-U phosphoramidite (5'-Dimethoxytrityl-5-[N-(trifluoroacetylaminohexyl)-3-acry limido]-Uridine, 2'-O-triisopropylsilyloxymethyl-3'-[(2-cyanoethyl)-(N,N-dii sopropyl)]-phosphoramidite))
  modified_base 52: mod_base = OTHER; note = 2'-O-methyl modified nucleotide
  modified_base 63: mod_base = OTHER; note = Nucleotide with phosphorothioate linkage
  modified_base 74: mod_base = OTHER; note = Nucleotide with phosphorothioate linkage
  modified_base 75: mod_base = OTHER; note = 2'-O-methyl modified nucleotide with phosphorothioate linkage
  modified_base 76: mod_base = OTHER; note = 2'-O-methyl modified nucleotide
  misc_feature 1..63: note = RNA
  misc_feature 64: note = DNA
  misc_feature 65..76: note = RNA

SEQ ID NO: 763 - RNA, 76 nt, synthetic construct; identical to SEQ ID NO: 622
  source 1..76: mol_type = other RNA
  modified_base 1: mod_base = OTHER; note = 2'-O-methyl modified nucleotide
  modified_base 17: mod_base = OTHER; note = 2'-O-methyl modified nucleotide
  modified_base 18: mod_base = OTHER; note = 2'-O-methyl modified nucleotide
  modified_base 20: mod_base = OTHER; note = Nucleotide attached to AN1 (C6-U phosphoramidite (5'-Dimethoxytrityl-5-[N-(trifluoroacetylaminohexyl)-3-acry limido]-Uridine, 2'-O-triisopropylsilyloxymethyl-3'-[(2-cyanoethyl)-(N,N-dii sopropyl)]-phosphoramidite))
  modified_base 50: mod_base = OTHER; note = 2'-O-methyl modified nucleotide
  modified_base 52: mod_base = OTHER; note = 2'-O-methyl modified nucleotide
  modified_base 73: mod_base = OTHER; note = 2'-O-methyl modified nucleotide

SEQ ID NO: 764 - RNA, 76 nt, synthetic construct; identical to SEQ ID NO: 622
  source 1..76: mol_type = other RNA
  modified_base 1: mod_base = OTHER; note = 2'-O-methyl modified nucleotide with phosphorothioate linkage
  modified_base 2: mod_base = OTHER; note = 2'-O-methyl modified nucleotide with phosphorothioate linkage
  modified_base 20: mod_base = OTHER; note = Nucleotide attached to AN1 (C6-U phosphoramidite (5'-Dimethoxytrityl-5-[N-(trifluoroacetylaminohexyl)-3-acry limido]-Uridine, 2'-O-triisopropylsilyloxymethyl-3'-[(2-cyanoethyl)-(N,N-dii sopropyl)]-phosphoramidite))
  modified_base 43: mod_base = OTHER; note = Nucleotide with phosphorothioate linkage
  modified_base 55: mod_base = OTHER; note = Nucleotide with phosphorothioate linkage
  modified_base 74: mod_base = OTHER; note = Nucleotide with phosphorothioate linkage
  modified_base 75: mod_base = OTHER; note = 2'-O-methyl modified nucleotide

SEQ ID NO: 765 - RNA, 76 nt, synthetic construct; identical to SEQ ID NO: 622
  source 1..76: mol_type = other RNA
  modified_base 1: mod_base = OTHER; note = 2'-O-methyl modified nucleotide with phosphorothioate linkage
  modified_base 2: mod_base = OTHER; note = 2'-O-methyl modified nucleotide with phosphorothioate linkage
  modified_base 20: mod_base = OTHER; note = Nucleotide attached to AN1 (C6-U phosphoramidite (5'-Dimethoxytrityl-5-[N-(trifluoroacetylaminohexyl)-3-acry limido]-Uridine, 2'-O-triisopropylsilyloxymethyl-3'-[(2-cyanoethyl)-(N,N-dii sopropyl)]-phosphoramidite))
  modified_base 74: mod_base = OTHER; note = Nucleotide with phosphorothioate linkage
  modified_base 75: mod_base = OTHER; note = 2'-O-methyl modified nucleotide

SEQ ID NO: 766 - DNA, 76 bp, synthetic construct; identical to SEQ ID NO: 658
  source 1..76: mol_type = other DNA
  modified_base 1: mod_base = OTHER; note = 2'-O-methyl modified nucleotide with phosphorothioate linkage
  modified_base 2: mod_base = OTHER; note = 2'-O-methyl modified nucleotide with phosphorothioate linkage
  modified_base 20: mod_base = OTHER; note = Nucleotide attached to AN1 (C6-U phosphoramidite (5'-Dimethoxytrityl-5-[N-(trifluoroacetylaminohexyl)-3-acry limido]-Uridine, 2'-O-triisopropylsilyloxymethyl-3'-[(2-cyanoethyl)-(N,N-dii sopropyl)]-phosphoramidite))
  modified_base 27: mod_base = OTHER; note = Nucleotide with phosphorothioate linkage
  modified_base 51: mod_base = OTHER; note = Nucleotide with phosphorothioate linkage
  modified_base 59: mod_base = OTHER; note = 2'-fluoro modified nucleotide
  modified_base 74: mod_base = OTHER; note = Nucleotide with phosphorothioate linkage
  modified_base 75: mod_base = OTHER; note = 2'-O-methyl modified nucleotide
  misc_feature 1..51: note = RNA
  misc_feature 52: note = DNA
  misc_feature 53..76: note = RNA

SEQ ID NO: 767 - RNA, 76 nt, synthetic construct; identical to SEQ ID NO: 622
  source 1..76: mol_type = other RNA
  modified_base 1: mod_base = OTHER; note = 2'-O-methyl modified nucleotide with phosphorothioate linkage
  modified_base 2: mod_base = OTHER; note = 2'-O-methyl modified nucleotide with phosphorothioate linkage
  modified_base 13: mod_base = OTHER; note = 2'-fluoro modified nucleotide
  modified_base 14: mod_base = OTHER; note = 2'-fluoro modified nucleotide
  modified_base 20: mod_base = OTHER; note = Nucleotide attached to AN1 (C6-U phosphoramidite (5'-Dimethoxytrityl-5-[N-(trifluoroacetylaminohexyl)-3-acry limido]-Uridine, 2'-O-triisopropylsilyloxymethyl-3'-[(2-cyanoethyl)-(N,N-dii sopropyl)]-phosphoramidite))
  modified_base 54: mod_base = OTHER; note = 2'-fluoro modified nucleotide
  modified_base 59: mod_base = OTHER; note = 2'-O-methyl modified nucleotide
  modified_base 73: mod_base = OTHER; note = Nucleotide with phosphorothioate linkage
  modified_base 75: mod_base = OTHER; note = Nucleotide with phosphorothioate linkage
  modified_base 76: mod_base = OTHER; note = 2'-O-methyl modified nucleotide

SEQ ID NO: 768 - RNA, 76 nt, synthetic construct; identical to SEQ ID NO: 622
  source 1..76: mol_type = other RNA
  modified_base 1: mod_base = OTHER; note = 2'-O-methyl modified nucleotide with phosphorothioate linkage
  modified_base 2: mod_base = OTHER; note = 2'-O-methyl modified nucleotide with phosphorothioate linkage
  modified_base 20: mod_base = OTHER; note = Nucleotide attached to AN1 (C6-U phosphoramidite (5'-Dimethoxytrityl-5-[N-(trifluoroacetylaminohexyl)-3-acry limido]-Uridine, 2'-O-triisopropylsilyloxymethyl-3'-[(2-cyanoethyl)-(N,N-dii sopropyl)]-phosphoramidite))
  modified_base 45: mod_base = OTHER; note = 2'-fluoro modified nucleotide
  modified_base 57: mod_base = OTHER; note = 2'-fluoro modified nucleotide
  modified_base 68: mod_base = OTHER; note = 2'-fluoro modified nucleotide
  modified_base 74: mod_base = OTHER; note = Nucleotide with phosphorothioate linkage
  modified_base 75: mod_base = OTHER; note = 2'-O-methyl modified nucleotide with phosphorothioate linkage
  modified_base 76: mod_base = OTHER; note = 2'-O-methyl modified nucleotide

SEQ ID NO: 769 - RNA, 76 nt, synthetic construct; identical to SEQ ID NO: 622
  source 1..76: mol_type = other RNA
  modified_base 1: mod_base = OTHER; note = 2'-O-methyl modified nucleotide with phosphorothioate linkage
  modified_base 2: mod_base = OTHER; note = 2'-O-methyl modified nucleotide
  modified_base 20: mod_base = OTHER; note = Nucleotide attached to AN1 (C6-U phosphoramidite (5'-Dimethoxytrityl-5-[N-(trifluoroacetylaminohexyl)-3-acry limido]-Uridine, 2'-O-triisopropylsilyloxymethyl-3'-[(2-cyanoethyl)-(N,N-dii sopropyl)]-phosphoramidite))
  modified_base 74: mod_base = OTHER; note = Nucleotide with phosphorothioate linkage
  modified_base 75: mod_base = OTHER; note = 2'-O-methyl modified nucleotide

SEQ ID NO: 770 - DNA, 76 bp, synthetic construct; identical to SEQ ID NO: 658
  source 1..76: mol_type = other DNA
  modified_base 1: mod_base = OTHER; note = 2'-O-methyl modified nucleotide with phosphorothioate linkage
  modified_base 2: mod_base = OTHER; note = 2'-O-methyl modified nucleotide with phosphorothioate linkage
  modified_base 20: mod_base = OTHER; note = Nucleotide attached to AN1 (C6-U phosphoramidite (5'-Dimethoxytrityl-5-[N-(trifluoroacetylaminohexyl)-3-acry limido]-Uridine, 2'-O-triisopropylsilyloxymethyl-3'-[(2-cyanoethyl)-(N,N-dii sopropyl)]-phosphoramidite))
  modified_base 27: mod_base = OTHER; note = Nucleotide with phosphorothioate linkage
  modified_base 51: mod_base = OTHER; note = Nucleotide with phosphorothioate linkage
  modified_base 59: mod_base = OTHER; note = 2'-fluoro modified nucleotide
  modified_base 73: mod_base = OTHER; note = Nucleotide with phosphorothioate linkage
  modified_base 74: mod_base = OTHER; note = Nucleotide with phosphorothioate linkage
  modified_base 75: mod_base = OTHER; note = 2'-O-methyl modified nucleotide
  misc_feature 1..51: note = RNA
  misc_feature 52: note = DNA
  misc_feature 53..76: note = RNA

SEQ ID NO: 771 - RNA, 76 nt, synthetic construct; identical to SEQ ID NO: 622
  source 1..76: mol_type = other RNA
  modified_base 1: mod_base = OTHER; note = 2'-O-methyl modified nucleotide with phosphorothioate linkage
  modified_base 2: mod_base = OTHER; note = 2'-O-methyl modified nucleotide
  modified_base 20: mod_base = OTHER; note = Nucleotide attached to AN1 (C6-U phosphoramidite (5'-Dimethoxytrityl-5-[N-(trifluoroacetylaminohexyl)-3-acry limido]-Uridine, 2'-O-triisopropylsilyloxymethyl-3'-[(2-cyanoethyl)-(N,N-dii sopropyl)]-phosphoramidite))
  modified_base 25: mod_base = OTHER; note = 2'-fluoro modified nucleotide
  modified_base 74: mod_base = OTHER; note = Nucleotide with phosphorothioate linkage
  modified_base 75: mod_base = OTHER; note = 2'-O-methyl modified nucleotide

SEQ ID NO: 772 - RNA, 76 nt, synthetic construct; identical to SEQ ID NO: 622
  source 1..76: mol_type = other RNA
  modified_base 1: mod_base = OTHER; note = 2'-O-methyl modified nucleotide with phosphorothioate linkage
  modified_base 2: mod_base = OTHER; note = 2'-O-methyl modified nucleotide with phosphorothioate linkage
  modified_base 13: mod_base = OTHER; note = 2'-fluoro modified nucleotide
  modified_base 14: mod_base = OTHER; note = 2'-fluoro modified nucleotide
  modified_base 20: mod_base = OTHER; note = Nucleotide attached to AN1 (C6-U phosphoramidite (5'-Dimethoxytrityl-5-[N-(trifluoroacetylaminohexyl)-3-acry limido]-Uridine, 2'-O-triisopropylsilyloxymethyl-3'-[(2-cyanoethyl)-(N,N-dii sopropyl)]-phosphoramidite))
  modified_base 54: mod_base = OTHER; note = 2'-fluoro modified nucleotide
  modified_base 59: mod_base = OTHER; note = 2'-O-methyl modified nucleotide
  modified_base 75: mod_base = OTHER; note = Nucleotide with phosphorothioate linkage
  modified_base 76: mod_base = OTHER; note = 2'-O-methyl modified nucleotide

SEQ ID NO: 773 - RNA, 76 nt, synthetic construct; identical to SEQ ID NO: 622
  source 1..76: mol_type = other RNA
  modified_base 1: mod_base = OTHER; note = 2'-O-methyl modified nucleotide with phosphorothioate linkage
  modified_base 2: mod_base = OTHER; note = 2'-O-methyl modified nucleotide
  modified_base 20: mod_base = OTHER; note = Nucleotide attached to AN1 (C6-U phosphoramidite (5'-Dimethoxytrityl-5-[N-(trifluoroacetylaminohexyl)-3-acry limido]-Uridine, 2'-O-triisopropylsilyloxymethyl-3'-[(2-cyanoethyl)-(N,N-dii sopropyl)]-phosphoramidite))
  modified_base 73: mod_base = OTHER; note = Nucleotide with phosphorothioate linkage
  modified_base 74: mod_base = OTHER; note = Nucleotide with phosphorothioate linkage
  modified_base 75: mod_base = OTHER; note = 2'-O-methyl modified nucleotide

SEQ ID NO: 774 - DNA, 76 bp, synthetic construct; identical to SEQ ID NO: 658
  source 1..76: mol_type = other DNA
  modified_base 1: mod_base = OTHER; note = 2'-O-methyl modified nucleotide with phosphorothioate linkage
  modified_base 2: mod_base = OTHER; note = 2'-O-methyl modified nucleotide with phosphorothioate linkage
  modified_base 20: mod_base = OTHER; note = Nucleotide attached to AN1 (C6-U phosphoramidite (5'-Dimethoxytrityl-5-[N-(trifluoroacetylaminohexyl)-3-acry limido]-Uridine, 2'-O-triisopropylsilyloxymethyl-3'-[(2-cyanoethyl)-(N,N-dii sopropyl)]-phosphoramidite))
  modified_base 52: mod_base = OTHER; note = 2'-O-methyl modified nucleotide
  modified_base 63: mod_base = OTHER; note = Nucleotide with phosphorothioate linkage
  modified_base 74: mod_base = OTHER; note = Nucleotide with phosphorothioate linkage
  modified_base 75: mod_base = OTHER; note = 2'-O-methyl modified nucleotide with phosphorothioate linkage
  modified_base 76: mod_base = OTHER; note = 2'-O-methyl modified nucleotide
  misc_feature 1..63: note = RNA
  misc_feature 64: note = DNA
  misc_feature 65..76: note = RNA

SEQ ID NO: 775 - RNA, 76 nt, synthetic construct; identical to SEQ ID NO: 622
  source 1..76: mol_type = other RNA
  modified_base 1: mod_base = OTHER; note = 2'-O-methyl modified nucleotide
  modified_base 17: mod_base = OTHER; note = 2'-O-methyl modified nucleotide
  modified_base 18: mod_base = OTHER; note = 2'-O-methyl modified nucleotide
  modified_base 47: mod_base = OTHER; note = Nucleotide attached to AN1 (C6-U phosphoramidite (5'-Dimethoxytrityl-5-[N-(trifluoroacetylaminohexyl)-3-acry limido]-Uridine, 2'-O-triisopropylsilyloxymethyl-3'-[(2-cyanoethyl)-(N,N-dii sopropyl)]-phosphoramidite))
  modified_base 50: mod_base = OTHER; note = 2'-O-methyl modified nucleotide
  modified_base 52: mod_base = OTHER; note = 2'-O-methyl modified nucleotide
  modified_base 73: mod_base = OTHER; note = 2'-O-methyl modified nucleotide

SEQ ID NO: 776 - RNA, 76 nt, synthetic construct; identical to SEQ ID NO: 622
  source 1..76: mol_type = other RNA
  modified_base 1: mod_base = OTHER; note = 2'-O-methyl modified nucleotide with phosphorothioate linkage
  modified_base 2: mod_base = OTHER; note = 2'-O-methyl modified nucleotide with phosphorothioate linkage
  modified_base 43: mod_base = OTHER; note = Nucleotide with phosphorothioate linkage
  modified_base 47: mod_base = OTHER; note = Nucleotide attached to AN1 (C6-U phosphoramidite (5'-Dimethoxytrityl-5-[N-(trifluoroacetylaminohexyl)-3-acry limido]-Uridine, 2'-O-triisopropylsilyloxymethyl-3'-[(2-cyanoethyl)-(N,N-dii sopropyl)]-phosphoramidite))
  modified_base 55: mod_base = OTHER; note = Nucleotide with phosphorothioate linkage
  modified_base 74: mod_base = OTHER; note = Nucleotide with phosphorothioate linkage
  modified_base 75: mod_base = OTHER; note = 2'-O-methyl modified nucleotide

SEQ ID NO: 777 - RNA, 76 nt, synthetic construct; identical to SEQ ID NO: 622
  source 1..76: mol_type = other RNA
  modified_base 1: mod_base = OTHER; note = 2'-O-methyl modified nucleotide with phosphorothioate linkage
  modified_base 2: mod_base = OTHER; note = 2'-O-methyl modified nucleotide with phosphorothioate linkage
  modified_base 47: mod_base = OTHER; note = Nucleotide attached to AN1 (C6-U phosphoramidite (5'-Dimethoxytrityl-5-[N-(trifluoroacetylaminohexyl)-3-acry limido]-Uridine, 2'-O-triisopropylsilyloxymethyl-3'-[(2-cyanoethyl)-(N,N-dii sopropyl)]-phosphoramidite))
  modified_base 74: mod_base = OTHER; note = Nucleotide with phosphorothioate linkage
  modified_base 75: mod_base = OTHER; note = 2'-O-methyl modified nucleotide

SEQ ID NO: 778 - DNA, 76 bp, synthetic construct; identical to SEQ ID NO: 658
  source 1..76: mol_type = other DNA
  modified_base 1: mod_base = OTHER; note = 2'-O-methyl modified nucleotide with phosphorothioate linkage
  modified_base 2: mod_base = OTHER; note = 2'-O-methyl modified nucleotide with phosphorothioate linkage
  modified_base 27: mod_base = OTHER; note = Nucleotide with phosphorothioate linkage
  modified_base 47: mod_base = OTHER; note = Nucleotide attached to AN1 (C6-U phosphoramidite (5'-Dimethoxytrityl-5-[N-(trifluoroacetylaminohexyl)-3-acry limido]-Uridine, 2'-O-triisopropylsilyloxymethyl-3'-[(2-cyanoethyl)-(N,N-dii sopropyl)]-phosphoramidite))
  modified_base 51: mod_base = OTHER; note = Nucleotide with phosphorothioate linkage
  modified_base 59: mod_base = OTHER; note = 2'-fluoro modified nucleotide
  modified_base 74: mod_base = OTHER; note = Nucleotide with phosphorothioate linkage
  modified_base 75: mod_base = OTHER; note = 2'-O-methyl modified nucleotide
  misc_feature 1..51: note = RNA
  misc_feature 52: note = DNA
  misc_feature 53..76: note = RNA

SEQ ID NO: 779 - RNA, 76 nt, synthetic construct; identical to SEQ ID NO: 622
  source 1..76: mol_type = other RNA
  modified_base 1: mod_base = OTHER; note = 2'-O-methyl modified nucleotide with phosphorothioate linkage
  modified_base 2: mod_base = OTHER; note = 2'-O-methyl modified nucleotide with phosphorothioate linkage
  modified_base 13: mod_base = OTHER; note = 2'-fluoro modified nucleotide
  modified_base 14: mod_base = OTHER; note = 2'-fluoro modified nucleotide
  modified_base 47: mod_base = OTHER; note = Nucleotide attached to AN1 (C6-U phosphoramidite (5'-Dimethoxytrityl-5-[N-(trifluoroacetylaminohexyl)-3-acry limido]-Uridine, 2'-O-triisopropylsilyloxymethyl-3'-[(2-cyanoethyl)-(N,N-dii sopropyl)]-phosphoramidite))
  modified_base 54: mod_base = OTHER; note = 2'-fluoro modified nucleotide
  modified_base 59: mod_base = OTHER; note = 2'-O-methyl modified nucleotide
  modified_base 73: mod_base = OTHER; note = Nucleotide with phosphorothioate linkage
  modified_base 75: mod_base = OTHER; note = Nucleotide with phosphorothioate linkage
  modified_base 76: mod_base = OTHER; note = 2'-O-methyl modified nucleotide

SEQ ID NO: 780 - RNA, 76 nt, synthetic construct; identical to SEQ ID NO: 622
  source 1..76: mol_type = other RNA
  modified_base 1: mod_base = OTHER; note = 2'-O-methyl modified nucleotide with phosphorothioate linkage
  modified_base 2: mod_base = OTHER; note = 2'-O-methyl modified nucleotide with phosphorothioate linkage
  modified_base 45: mod_base = OTHER; note = 2'-fluoro modified nucleotide
  modified_base 47: mod_base = OTHER; note = Nucleotide attached to AN1 (C6-U phosphoramidite (5'-Dimethoxytrityl-5-[N-(trifluoroacetylaminohexyl)-3-acry limido]-Uridine, 2'-O-triisopropylsilyloxymethyl-3'-[(2-cyanoethyl)-(N,N-dii sopropyl)]-phosphoramidite))
  modified_base 57: mod_base = OTHER; note = 2'-fluoro modified nucleotide
  modified_base 68: mod_base = OTHER; note = 2'-fluoro modified nucleotide
  modified_base 74: mod_base = OTHER; note = Nucleotide with phosphorothioate linkage
  modified_base 75: mod_base = OTHER; note = 2'-O-methyl modified nucleotide with phosphorothioate linkage
  modified_base 76: mod_base = OTHER; note = 2'-O-methyl modified nucleotide

SEQ ID NO: 781 - RNA, 76 nt, synthetic construct; identical to SEQ ID NO: 622
  source 1..76: mol_type = other RNA
  modified_base 1: mod_base = OTHER; note = 2'-O-methyl modified nucleotide with phosphorothioate linkage
  modified_base 2: mod_base = OTHER; note = 2'-O-methyl modified nucleotide
  modified_base 47: mod_base = OTHER; note = Nucleotide attached to AN1 (C6-U phosphoramidite (5'-Dimethoxytrityl-5-[N-(trifluoroacetylaminohexyl)-3-acry limido]-Uridine, 2'-O-triisopropylsilyloxymethyl-3'-[(2-cyanoethyl)-(N,N-dii sopropyl)]-phosphoramidite))
  modified_base 74: mod_base = OTHER; note = Nucleotide with phosphorothioate linkage
  modified_base 75: mod_base = OTHER; note = 2'-O-methyl modified nucleotide

SEQ ID NO: 782 - DNA, 76 bp, synthetic construct; identical to SEQ ID NO: 658
  source 1..76: mol_type = other DNA
  modified_base 1: mod_base = OTHER; note = 2'-O-methyl modified nucleotide with phosphorothioate linkage
  modified_base 2: mod_base = OTHER; note = 2'-O-methyl modified nucleotide with phosphorothioate linkage
  modified_base 27: mod_base = OTHER; note = Nucleotide with phosphorothioate linkage
  modified_base 47: mod_base = OTHER; note = Nucleotide attached to AN1 (C6-U phosphoramidite (5'-Dimethoxytrityl-5-[N-(trifluoroacetylaminohexyl)-3-acry limido]-Uridine, 2'-O-triisopropylsilyloxymethyl-3'-[(2-cyanoethyl)-(N,N-dii sopropyl)]-phosphoramidite))
  modified_base 51: mod_base = OTHER; note = Nucleotide with phosphorothioate linkage
  modified_base 59: mod_base = OTHER; note = 2'-fluoro modified nucleotide
  modified_base 73: mod_base = OTHER; note = Nucleotide with phosphorothioate linkage
  modified_base 74: mod_base = OTHER; note = Nucleotide with phosphorothioate linkage
  modified_base 75: mod_base = OTHER; note = 2'-O-methyl modified nucleotide
  misc_feature 1..51: note = RNA
  misc_feature 52: note = DNA
  misc_feature 53..76: note = RNA

SEQ ID NO: 783 - RNA, 76 nt, synthetic construct; identical to SEQ ID NO: 622
  source 1..76: mol_type = other RNA
  modified_base 1: mod_base = OTHER; note = 2'-O-methyl modified nucleotide with phosphorothioate linkage
  modified_base 2: mod_base = OTHER; note = 2'-O-methyl modified nucleotide
  modified_base 25: mod_base = OTHER; note = 2'-fluoro modified nucleotide
  modified_base 47: mod_base = OTHER; note = Nucleotide attached to AN1 (C6-U phosphoramidite (5'-Dimethoxytrityl-5-[N-(trifluoroacetylaminohexyl)-3-acry limido]-Uridine, 2'-O-triisopropylsilyloxymethyl-3'-[(2-cyanoethyl)-(N,N-dii sopropyl)]-phosphoramidite))
  modified_base 74: mod_base = OTHER; note = Nucleotide with phosphorothioate linkage
  modified_base 75: mod_base = OTHER; note = 2'-O-methyl modified nucleotide

SEQ ID NO: 784 - RNA, 76 nt, synthetic construct; identical to SEQ ID NO: 622
  source 1..76: mol_type = other RNA
  modified_base 1: mod_base = OTHER; note = 2'-O-methyl modified nucleotide with phosphorothioate linkage
  modified_base 2: mod_base = OTHER; note = 2'-O-methyl modified nucleotide with phosphorothioate linkage
  modified_base 13: mod_base = OTHER; note = 2'-fluoro modified nucleotide
  modified_base 14: mod_base = OTHER; note = 2'-fluoro modified nucleotide
  modified_base 47: mod_base = OTHER; note = Nucleotide attached to AN1 (C6-U phosphoramidite (5'-Dimethoxytrityl-5-[N-(trifluoroacetylaminohexyl)-3-acry limido]-Uridine, 2'-O-triisopropylsilyloxymethyl-3'-[(2-cyanoethyl)-(N,N-dii sopropyl)]-phosphoramidite))
  modified_base 54: mod_base = OTHER; note = 2'-fluoro modified nucleotide
  modified_base 59: mod_base = OTHER; note = 2'-O-methyl modified nucleotide
  modified_base 75: mod_base = OTHER; note = Nucleotide with phosphorothioate linkage
  modified_base 76: mod_base = OTHER; note = 2'-O-methyl modified nucleotide

SEQ ID NO: 785 - RNA, 76 nt, synthetic construct; identical to SEQ ID NO: 622
  source 1..76: mol_type = other RNA
  modified_base 1: mod_base = OTHER; note = 2'-O-methyl modified nucleotide with phosphorothioate linkage
  modified_base 2: mod_base = OTHER; note = 2'-O-methyl modified nucleotide
  modified_base 47: mod_base = OTHER; note = Nucleotide attached to AN1 (C6-U phosphoramidite (5'-Dimethoxytrityl-5-[N-(trifluoroacetylaminohexyl)-3-acry limido]-Uridine, 2'-O-triisopropylsilyloxymethyl-3'-[(2-cyanoethyl)-(N,N-dii sopropyl)]-phosphoramidite))
  modified_base 73: mod_base = OTHER; note = Nucleotide with phosphorothioate linkage
  modified_base 74: mod_base = OTHER; note = Nucleotide with phosphorothioate linkage
  modified_base 75: mod_base = OTHER; note = 2'-O-methyl modified nucleotide

SEQ ID NO: 786 - DNA, 76 bp, synthetic construct; identical to SEQ ID NO: 658
  source 1..76: mol_type = other DNA
  modified_base 1: mod_base = OTHER; note = 2'-O-methyl modified nucleotide with phosphorothioate linkage
  modified_base 2: mod_base = OTHER; note = 2'-O-methyl modified nucleotide with phosphorothioate linkage
  modified_base 47: mod_base = OTHER; note = Nucleotide attached to AN1 (C6-U phosphoramidite (5'-Dimethoxytrityl-5-[N-(trifluoroacetylaminohexyl)-3-acry limido]-Uridine, 2'-O-triisopropylsilyloxymethyl-3'-[(2-cyanoethyl)-(N,N-dii sopropyl)]-phosphoramidite))
  modified_base 52: mod_base = OTHER; note = 2'-O-methyl modified nucleotide
  modified_base 63: mod_base = OTHER; note = Nucleotide with phosphorothioate linkage
  modified_base 74: mod_base = OTHER; note = Nucleotide with phosphorothioate linkage
  modified_base 75: mod_base = OTHER; note = 2'-O-methyl modified nucleotide with phosphorothioate linkage
  modified_base 76: mod_base = OTHER; note = 2'-O-methyl modified nucleotide
  misc_feature 1..63: note = RNA
  misc_feature 64: note = DNA
  misc_feature 65..76: note = RNA

SEQ ID NO: 787 - RNA, 75 nt, synthetic construct; identical to SEQ ID NO: 633
  source 1..75: mol_type = other RNA
  modified_base 1: mod_base = OTHER; note = 2'-O-methyl modified nucleotide with phosphorothioate linkage
  modified_base 2: mod_base = OTHER; note = 2'-O-methyl modified nucleotide
  modified_base 13: mod_base = OTHER; note = Nucleotide with phosphorothioate linkage
  modified_base 14: mod_base = OTHER; note = 2'-O-methyl modified nucleotide
  modified_base 54: mod_base = OTHER; note = Nucleotide with phosphorothioate linkage
  modified_base 73: mod_base = OTHER; note = Nucleotide with phosphorothioate linkage
  modified_base 74: mod_base = OTHER; note = 2'-O-methyl modified nucleotide

SEQ ID NO: 788 - RNA, 75 nt, synthetic construct; identical to SEQ ID NO: 633
  source 1..75: mol_type = other RNA
  modified_base 1: mod_base = OTHER; note = 2'-O-methyl modified nucleotide with phosphorothioate linkage
  modified_base 2: mod_base = OTHER; note = 2'-O-methyl modified nucleotide with phosphorothioate linkage
  modified_base 12: mod_base = OTHER; note = Nucleotide with phosphorothioate linkage
  modified_base 13: mod_base = OTHER; note = 2'-fluoro modified nucleotide with phosphorothioate linkage
  modified_base 23: mod_base = OTHER; note = Nucleotide with phosphorothioate linkage
  modified_base 24: mod_base = OTHER; note = 2'-fluoro modified nucleotide
  modified_base 43: mod_base = OTHER; note = 2'-fluoro modified nucleotide
  modified_base 51: mod_base = OTHER; note = Nucleotide with phosphorothioate linkage
  modified_base 58: mod_base = OTHER; note = 2'-O-methyl modified nucleotide with phosphorothioate linkage
  modified_base 60: mod_base = OTHER; note = 2'-fluoro modified nucleotide
  modified_base 67: mod_base = OTHER; note = 2'-fluoro modified nucleotide
  modified_base 69: mod_base = OTHER; note = 2'-fluoro modified nucleotide
  modified_base 73: mod_base = OTHER; note = Nucleotide with phosphorothioate linkage
  modified_base 74: mod_base = OTHER; note = 2'-O-methyl modified nucleotide

SEQ ID NO: 789 - RNA, 75 nt, synthetic construct; identical to SEQ ID NO: 633
  source 1..75: mol_type = other RNA
  modified_base 1: mod_base = OTHER; note = 2'-O-methyl modified nucleotide with phosphorothioate linkage
  modified_base 2: mod_base = OTHER; note = 2'-O-methyl modified nucleotide with phosphorothioate linkage
  modified_base 14: mod_base = OTHER; note = 2'-fluoro modified nucleotide
  modified_base 16: mod_base = OTHER; note = 2'-fluoro modified nucleotide
  modified_base 22: mod_base = OTHER; note = 2'-fluoro modified nucleotide
  modified_base 24: mod_base = OTHER; note = 2'-fluoro modified nucleotide
  modified_base 40: mod_base = OTHER; note = Nucleotide with phosphorothioate linkage
  modified_base 43: mod_base = OTHER; note = 2'-fluoro modified nucleotide
  modified_base 44: mod_base = OTHER; note = 2'-fluoro modified nucleotide
  modified_base 45: mod_base = OTHER; note = 2'-fluoro modified nucleotide with phosphorothioate linkage
  modified_base 51: mod_base = OTHER; note = 2'-fluoro modified nucleotide
  modified_base 60: mod_base = OTHER; note = 2'-fluoro modified nucleotide
  modified_base 73: mod_base = OTHER; note = Nucleotide with phosphorothioate linkage

SEQ ID NO: 790 - RNA, 75 nt, synthetic construct; identical to SEQ ID NO: 633
  source 1..75: mol_type = other RNA
  modified_base 1: mod_base = OTHER; note = 2'-O-methyl modified nucleotide
  modified_base 40: mod_base = OTHER; note = 2'-fluoro modified nucleotide
  modified_base 41: mod_base = OTHER; note = 2'-O-methyl modified nucleotide with phosphorothioate linkage
  modified_base 42: mod_base = OTHER; note = 2'-fluoro modified nucleotide
  modified_base 43: mod_base = OTHER; note = 2'-O-methyl modified nucleotide with phosphorothioate linkage
  modified_base 72: mod_base = OTHER; note = 2'-O-methyl modified nucleotide

SEQ ID NO: 791 - RNA, 75 nt, synthetic construct; identical to SEQ ID NO: 633
  source 1..75: mol_type = other RNA
  modified_base 1: mod_base = OTHER; note = 2'-O-methyl modified nucleotide with phosphorothioate linkage
  modified_base 2: mod_base = OTHER; note = 2'-O-methyl modified nucleotide
  modified_base 73: mod_base = OTHER; note = Nucleotide with phosphorothioate linkage
  modified_base 74: mod_base = OTHER; note = 2'-O-methyl modified nucleotide

SEQ ID NO: 792 - RNA, 75 nt, synthetic construct; identical to SEQ ID NO: 633
  source 1..75: mol_type = other RNA
  modified_base 1: mod_base = OTHER; note = 2'-O-methyl modified nucleotide with phosphorothioate linkage
  modified_base 2: mod_base = OTHER; note = 2'-O-methyl modified nucleotide

SEQ ID NO: 793 - RNA, 75 nt, synthetic construct; identical to SEQ ID NO: 633
  source 1..75: mol_type = other RNA
  modified_base 1: mod_base = OTHER; note = 2'-O-methyl modified nucleotide with phosphorothioate linkage
  modified_base 2: mod_base = OTHER; note = 2'-O-methyl modified nucleotide with phosphorothioate linkage
  modified_base 74: mod_base = OTHER; note = Nucleotide with phosphorothioate linkage
  modified_base 75: mod_base = OTHER; note = 2'-O-methyl modified nucleotide

SEQ ID NO: 794 - RNA, 75 nt, synthetic construct; identical to SEQ ID NO: 633
  source 1..75: mol_type = other RNA
  modified_base 1: mod_base = OTHER; note = 2'-O-methyl modified nucleotide with phosphorothioate linkage
  modified_base 2: mod_base = OTHER; note = 2'-O-methyl modified nucleotide with phosphorothioate linkage
  modified_base 51: mod_base = OTHER; note = Nucleotide with phosphorothioate linkage
  modified_base 73: mod_base = OTHER; note = Nucleotide with phosphorothioate linkage
  modified_base 74: mod_base = OTHER; note = 2'-O-methyl modified nucleotide

SEQ ID NO: 795 - RNA, 75 nt, synthetic construct; identical to SEQ ID NO: 633
  source 1..75: mol_type = other RNA
  modified_base 1: mod_base = OTHER; note = 2'-O-methyl modified nucleotide with phosphorothioate linkage
  modified_base 2: mod_base = OTHER; note = 2'-O-methyl modified nucleotide with phosphorothioate linkage
  modified_base 13: mod_base = OTHER; note = 2'-fluoro modified nucleotide
  modified_base 14: mod_base = OTHER; note = 2'-fluoro modified nucleotide
  modified_base 53: mod_base = OTHER; note = 2'-fluoro modified nucleotide
  modified_base 58: mod_base = OTHER; note = 2'-O-methyl modified nucleotide
  modified_base 74: mod_base = OTHER; note = Nucleotide with phosphorothioate linkage
  modified_base 75: mod_base = OTHER; note = 2'-O-methyl modified nucleotide

SEQ ID NO: 796 - RNA, 75 nt, synthetic construct; identical to SEQ ID NO: 633
  source 1..75: mol_type = other RNA
  modified_base 1: mod_base = OTHER; note = 2'-O-methyl modified nucleotide with phosphorothioate linkage
  modified_base 2: mod_base = OTHER; note = 2'-O-methyl modified nucleotide
  modified_base 46: mod_base = OTHER; note = 2'-fluoro modified nucleotide
  modified_base 58: mod_base = OTHER; note = 2'-O-methyl modified nucleotide
  modified_base 74: mod_base = OTHER; note = Nucleotide with phosphorothioate linkage
  modified_base 75: mod_base = OTHER; note = 2'-O-methyl modified nucleotide

SEQ ID NO: 797 - RNA, 75 nt, synthetic construct; identical to SEQ ID NO: 633
  source 1..75: mol_type = other RNA
  modified_base 1: mod_base = OTHER; note = 2'-O-methyl modified nucleotide with phosphorothioate linkage attached to N-acetylgalactosamine-triethylamine
  modified_base 2: mod_base = OTHER; note = 2'-O-methyl modified nucleotide
  modified_base 13: mod_base = OTHER; note = Nucleotide with phosphorothioate linkage
  modified_base 14: mod_base = OTHER; note = 2'-O-methyl modified nucleotide
  modified_base 54: mod_base = OTHER; note = Nucleotide with phosphorothioate linkage
  modified_base 73: mod_base = OTHER; note = Nucleotide with phosphorothioate linkage
  modified_base 74: mod_base = OTHER; note = 2'-O-methyl modified nucleotide

SEQ ID NO: 798 - RNA, 75 nt, synthetic construct; identical to SEQ ID NO: 633
  source 1..75: mol_type = other RNA
  modified_base 1: mod_base = OTHER; note = 2'-O-methyl modified nucleotide with phosphorothioate linkage attached to N-acetylgalactosamine-triethylamine
  modified_base 2: mod_base = OTHER; note = 2'-O-methyl modified nucleotide with phosphorothioate linkage
  modified_base 12: mod_base = OTHER; note = Nucleotide with phosphorothioate linkage
  modified_base 13: mod_base = OTHER; note = 2'-fluoro modified nucleotide with phosphorothioate linkage
  modified_base 23: mod_base = OTHER; note = Nucleotide with phosphorothioate linkage
  modified_base 24: mod_base = OTHER; note = 2'-fluoro modified nucleotide
  modified_base 43: mod_base = OTHER; note = 2'-fluoro modified nucleotide
  modified_base 51: mod_base = OTHER; note = Nucleotide with phosphorothioate linkage
  modified_base 58: mod_base = OTHER; note = 2'-O-methyl modified nucleotide with phosphorothioate linkage
  modified_base 60: mod_base = OTHER; note = 2'-fluoro modified nucleotide
  modified_base 67: mod_base = OTHER; note = 2'-fluoro modified nucleotide
  modified_base 69: mod_base = OTHER; note = 2'-fluoro modified nucleotide
  modified_base 73: mod_base = OTHER; note = Nucleotide with phosphorothioate linkage
  modified_base 74: mod_base = OTHER; note = 2'-O-methyl modified nucleotide

SEQ ID NO: 799 - RNA, 75 nt, synthetic construct; identical to SEQ ID NO: 633
  source 1..75: mol_type = other RNA
  modified_base 1: mod_base = OTHER; note = 2'-O-methyl modified nucleotide with phosphorothioate linkage attached to N-acetylgalactosamine-triethylamine
  modified_base 2: mod_base = OTHER; note = 2'-O-methyl modified nucleotide with phosphorothioate linkage
  modified_base 14: mod_base = OTHER; note = 2'-fluoro modified nucleotide
  modified_base 16: mod_base = OTHER; note = 2'-fluoro modified nucleotide
  modified_base 22: mod_base = OTHER; note = 2'-fluoro modified nucleotide
  modified_base 24: mod_base = OTHER; note = 2'-fluoro modified nucleotide
  modified_base 40: mod_base = OTHER; note = Nucleotide with phosphorothioate linkage
  modified_base 43: mod_base = OTHER; note = 2'-fluoro modified nucleotide
  modified_base 44: mod_base = OTHER; note = 2'-fluoro modified nucleotide
  modified_base 45: mod_base = OTHER; note = 2'-fluoro modified nucleotide with phosphorothioate linkage
  modified_base 51: mod_base = OTHER; note = 2'-fluoro modified nucleotide
  modified_base 60: mod_base = OTHER; note = 2'-fluoro modified nucleotide
  modified_base 73: mod_base = OTHER; note = Nucleotide with phosphorothioate linkage

SEQ ID NO: 800 - RNA, 75 nt, synthetic construct; identical to SEQ ID NO: 633
  source 1..75: mol_type = other RNA
  modified_base 1: mod_base = OTHER; note = 2'-O-methyl modified nucleotide attached to N-acetylgalactosamine-triethylamine
  modified_base 40: mod_base = OTHER; note = 2'-fluoro modified nucleotide
  modified_base 41: mod_base = OTHER; note = 2'-O-methyl modified nucleotide with phosphorothioate linkage
  modified_base 42: mod_base = OTHER; note = 2'-fluoro modified nucleotide
  modified_base 43: mod_base = OTHER; note = 2'-O-methyl modified nucleotide with phosphorothioate linkage
  modified_base 72: mod_base = OTHER; note = 2'-O-methyl modified nucleotide

SEQ ID NO: 801 - RNA, 75 nt, synthetic construct; identical to SEQ ID NO: 633
  source 1..75: mol_type = other RNA
  modified_base 1: mod_base = OTHER; note = 2'-O-methyl modified nucleotide with phosphorothioate linkage attached to N-acetylgalactosamine-triethylamine
  modified_base 2: mod_base = OTHER; note = 2'-O-methyl modified nucleotide
  modified_base 73: mod_base = OTHER; note = Nucleotide with phosphorothioate linkage
  modified_base 74: mod_base = OTHER; note = 2'-O-methyl modified nucleotide

SEQ ID NO: 802 - RNA, 75 nt, synthetic construct; identical to SEQ ID NO: 633
  source 1..75: mol_type = other RNA
  modified_base 1: mod_base = OTHER; note = 2'-O-methyl modified nucleotide with phosphorothioate linkage attached to N-acetylgalactosamine-triethylamine
  modified_base 2: mod_base = OTHER; note = 2'-O-methyl modified nucleotide

SEQ ID NO: 803 - RNA, 75 nt, synthetic construct; identical to SEQ ID NO: 633
  source 1..75: mol_type = other RNA
  modified_base 1: mod_base = OTHER; note = 2'-O-methyl modified nucleotide with phosphorothioate linkage attached to N-acetylgalactosamine-triethylamine
  modified_base 2: mod_base = OTHER; note = 2'-O-methyl modified nucleotide with phosphorothioate linkage
  modified_base 74: mod_base = OTHER; note = Nucleotide with phosphorothioate linkage
  modified_base 75: mod_base = OTHER; note = 2'-O-methyl modified nucleotide

SEQ ID NO: 804 - RNA, 75 nt, synthetic construct; identical to SEQ ID NO: 633
  source 1..75: mol_type = other RNA
  modified_base 1: mod_base = OTHER; note = 2'-O-methyl modified nucleotide with phosphorothioate linkage attached to N-acetylgalactosamine-triethylamine
  modified_base 2: mod_base = OTHER; note = 2'-O-methyl modified nucleotide with phosphorothioate linkage
  modified_base 51: mod_base = OTHER; note = Nucleotide with phosphorothioate linkage
  modified_base 73: mod_base = OTHER; note = Nucleotide with phosphorothioate linkage
  modified_base 74: mod_base = OTHER; note = 2'-O-methyl modified nucleotide

SEQ ID NO: 805 - RNA, 75 nt, synthetic construct; identical to SEQ ID NO: 633
  source 1..75: mol_type = other RNA
  modified_base 1: mod_base = OTHER; note = 2'-O-methyl modified nucleotide with phosphorothioate linkage attached to N-acetylgalactosamine-triethylamine
  modified_base 2: mod_base = OTHER; note = 2'-O-methyl modified nucleotide with phosphorothioate linkage
  modified_base 13: mod_base = OTHER; note = 2'-fluoro modified nucleotide
  modified_base 14: mod_base = OTHER; note = 2'-fluoro modified nucleotide
  modified_base 53: mod_base = OTHER; note = 2'-fluoro modified nucleotide
  modified_base 58: mod_base = OTHER; note = 2'-O-methyl modified nucleotide
  modified_base 74: mod_base = OTHER; note = Nucleotide with phosphorothioate linkage
  modified_base 75: mod_base = OTHER; note = 2'-O-methyl modified nucleotide

SEQ ID NO: 806 - RNA, 75 nt, synthetic construct; identical to SEQ ID NO: 633
  source 1..75: mol_type = other RNA
  modified_base 1: mod_base = OTHER; note = 2'-O-methyl modified nucleotide with phosphorothioate linkage attached to N-acetylgalactosamine-triethylamine
  modified_base 2: mod_base = OTHER; note = 2'-O-methyl modified nucleotide
  modified_base 46: mod_base = OTHER; note = 2'-fluoro modified nucleotide
  modified_base 58: mod_base = OTHER; note = 2'-O-methyl modified nucleotide
  modified_base 74: mod_base = OTHER; note = Nucleotide with phosphorothioate linkage
  modified_base 75: mod_base = OTHER; note = 2'-O-methyl modified nucleotide

SEQ ID NO: 807 - RNA, 75 nt, synthetic construct; identical to SEQ ID NO: 633
  source 1..75: mol_type = other RNA
  modified_base 1: mod_base = OTHER; note = 2'-O-methyl modified nucleotide with phosphorothioate linkage
  modified_base 2: mod_base = OTHER; note = 2'-O-methyl modified nucleotide
  modified_base 13: mod_base = OTHER; note = Nucleotide with phosphorothioate linkage
  modified_base 14: mod_base = OTHER; note = 2'-O-methyl modified nucleotide
  modified_base 16: mod_base = OTHER; note = Nucleotide attached to N-acetylgalactosamine
  modified_base 54: mod_base = OTHER; note = Nucleotide with phosphorothioate linkage
  modified_base 73: mod_base = OTHER; note = Nucleotide with phosphorothioate linkage
  modified_base 74: mod_base = OTHER; note = 2'-O-methyl modified nucleotide

SEQ ID NO: 808 - RNA, 75 nt, synthetic construct; identical to SEQ ID NO: 633
  source 1..75: mol_type = other RNA
  modified_base 1: mod_base = OTHER; note = 2'-O-methyl modified nucleotide with phosphorothioate linkage
  modified_base 2: mod_base = OTHER; note = 2'-O-methyl modified nucleotide with phosphorothioate linkage
  modified_base 12: mod_base = OTHER; note = Nucleotide with phosphorothioate linkage
  modified_base 13: mod_base = OTHER; note = 2'-fluoro modified nucleotide with phosphorothioate linkage
  modified_base 16: mod_base = OTHER; note = Nucleotide attached to N-acetylgalactosamine
  modified_base 23: mod_base = OTHER; note = Nucleotide with phosphorothioate linkage
  modified_base 24: mod_base = OTHER; note = 2'-fluoro modified nucleotide
  modified_base 43: mod_base = OTHER; note = 2'-fluoro modified nucleotide
  modified_base 51: mod_base = OTHER; note = Nucleotide with phosphorothioate linkage
  modified_base 58: mod_base = OTHER; note = 2'-O-methyl modified nucleotide with phosphorothioate linkage
  modified_base 60: mod_base = OTHER; note = 2'-fluoro modified nucleotide
  modified_base 67: mod_base = OTHER; note = 2'-fluoro modified nucleotide
  modified_base 69: mod_base = OTHER; note = 2'-fluoro modified nucleotide
  modified_base 73: mod_base = OTHER; note = Nucleotide with phosphorothioate linkage
  modified_base 74: mod_base = OTHER; note = 2'-O-methyl modified nucleotide

SEQ ID NO: 809 - RNA, 75 nt, synthetic construct; identical to SEQ ID NO: 633
  source 1..75: mol_type = other RNA
  modified_base 1: mod_base = OTHER; note = 2'-O-methyl modified nucleotide with phosphorothioate linkage
  modified_base 2: mod_base = OTHER; note = 2'-O-methyl modified nucleotide with phosphorothioate linkage
  modified_base 14: mod_base = OTHER; note = 2'-fluoro modified nucleotide
  modified_base 16: mod_base = OTHER; note = 2'-fluoro modified nucleotide attached to N-acetylgalactosamine
  modified_base 22: mod_base = OTHER; note = 2'-fluoro modified nucleotide
  modified_base 24: mod_base = OTHER; note = 2'-fluoro modified nucleotide
  modified_base 40: mod_base = OTHER; note = Nucleotide with phosphorothioate linkage
  modified_base 43: mod_base = OTHER; note = 2'-fluoro modified nucleotide
  modified_base 44: mod_base = OTHER; note = 2'-fluoro modified nucleotide
  modified_base 45: mod_base = OTHER; note = 2'-fluoro modified nucleotide with phosphorothioate linkage
  modified_base 51: mod_base = OTHER; note = 2'-fluoro modified nucleotide
  modified_base 60: mod_base = OTHER; note = 2'-fluoro modified nucleotide
  modified_base 73: mod_base = OTHER; note = Nucleotide with phosphorothioate linkage

SEQ ID NO: 810 - RNA, 75 nt, synthetic construct; identical to SEQ ID NO: 633
  source 1..75: mol_type = other RNA
  modified_base 1: mod_base = OTHER; note = 2'-O-methyl modified nucleotide
  modified_base 16: mod_base = OTHER; note = Nucleotide attached to N-acetylgalactosamine
  modified_base 40: mod_base = OTHER; note = 2'-fluoro modified nucleotide
  modified_base 41: mod_base = OTHER; note = 2'-O-methyl modified nucleotide with phosphorothioate linkage
  modified_base 42: mod_base = OTHER; note = 2'-fluoro modified nucleotide
  modified_base 43: mod_base = OTHER; note = 2'-O-methyl modified nucleotide with phosphorothioate linkage
  modified_base 72: mod_base = OTHER; note = 2'-O-methyl modified nucleotide

SEQ ID NO: 811 - RNA, 75 nt, synthetic construct; identical to SEQ ID NO: 633
  source 1..75: mol_type = other RNA
  modified_base 1: mod_base = OTHER; note = 2'-O-methyl modified nucleotide with phosphorothioate linkage
  modified_base 2: mod_base = OTHER; note = 2'-O-methyl modified nucleotide
  modified_base 16: mod_base = OTHER; note = Nucleotide attached to N-acetylgalactosamine
  modified_base 73: mod_base = OTHER; note = Nucleotide with phosphorothioate linkage
  modified_base 74: mod_base = OTHER; note = 2'-O-methyl modified nucleotide

SEQ ID NO: 812 - RNA, 75 nt, synthetic construct; identical to SEQ ID NO: 633
  source 1..75: mol_type = other RNA
  modified_base 1: mod_base = OTHER; note = 2'-O-methyl modified nucleotide with phosphorothioate linkage
  modified_base 2: mod_base = OTHER; note = 2'-O-methyl modified nucleotide
  modified_base 16: mod_base = OTHER; note = Nucleotide attached to N-acetylgalactosamine

SEQ ID NO: 813 - RNA, 75 nt, synthetic construct; identical to SEQ ID NO: 633
  source 1..75: mol_type = other RNA
  modified_base 1: mod_base = OTHER; note = 2'-O-methyl modified nucleotide with phosphorothioate linkage
  modified_base 2: mod_base = OTHER; note = 2'-O-methyl modified nucleotide with phosphorothioate linkage
  modified_base 16: mod_base = OTHER; note = Nucleotide attached to N-acetylgalactosamine
  modified_base 74: mod_base = OTHER; note = Nucleotide with phosphorothioate linkage
  modified_base 75: mod_base = OTHER; note = 2'-O-methyl modified nucleotide

SEQ ID NO: 814 - RNA, 75 nt, synthetic construct; identical to SEQ ID NO: 633
  source 1..75: mol_type = other RNA
  modified_base 1: mod_base = OTHER; note = 2'-O-methyl modified nucleotide with phosphorothioate linkage
  modified_base 2: mod_base = OTHER; note = 2'-O-methyl modified nucleotide with phosphorothioate linkage
  modified_base 16: mod_base = OTHER; note = Nucleotide attached to N-acetylgalactosamine
  modified_base 51: mod_base = OTHER; note = Nucleotide with phosphorothioate linkage
  modified_base 73: mod_base = OTHER; note = Nucleotide with phosphorothioate linkage
  modified_base 74: mod_base = OTHER; note = 2'-O-methyl modified nucleotide

SEQ ID NO: 815 - RNA, 75 nt, synthetic construct; identical to SEQ ID NO: 633
  source 1..75: mol_type = other RNA
  modified_base 1: mod_base = OTHER; note = 2'-O-methyl modified nucleotide with phosphorothioate linkage
  modified_base 2: mod_base = OTHER; note = 2'-O-methyl modified nucleotide with phosphorothioate linkage
  modified_base 13: mod_base = OTHER; note = 2'-fluoro modified nucleotide
  modified_base 14: mod_base = OTHER; note = 2'-fluoro modified nucleotide
  modified_base 16: mod_base = OTHER; note = Nucleotide attached to N-acetylgalactosamine
  modified_base 53: mod_base = OTHER; note = 2'-fluoro modified nucleotide
  modified_base 58: mod_base = OTHER; note = 2'-O-methyl modified nucleotide
  modified_base 74: mod_base = OTHER; note = Nucleotide with phosphorothioate linkage
  modified_base 75: mod_base = OTHER; note = 2'-O-methyl modified nucleotide

SEQ ID NO: 816 - RNA, 75 nt, synthetic construct; identical to SEQ ID NO: 633
  source 1..75: mol_type = other RNA
  modified_base 1: mod_base = OTHER; note = 2'-O-methyl modified nucleotide with phosphorothioate linkage
  modified_base 2: mod_base = OTHER; note = 2'-O-methyl modified nucleotide
  modified_base 16: mod_base = OTHER; note = Nucleotide attached to N-acetylgalactosamine
  modified_base 46: mod_base = OTHER; note = 2'-fluoro modified nucleotide
  modified_base 58: mod_base = OTHER; note = 2'-O-methyl modified nucleotide
  modified_base 74: mod_base = OTHER; note = Nucleotide with phosphorothioate linkage
  modified_base 75: mod_base = OTHER; note = 2'-O-methyl modified nucleotide

SEQ ID NO: 817 - RNA, 75 nt, synthetic construct; identical to SEQ ID NO: 633
  source 1..75: mol_type = other RNA
  modified_base 1: mod_base = OTHER; note = 2'-O-methyl modified nucleotide with phosphorothioate linkage
  modified_base 2: mod_base = OTHER; note = 2'-O-methyl modified nucleotide
  modified_base 13: mod_base = OTHER; note = Nucleotide with phosphorothioate linkage
  modified_base 14: mod_base = OTHER; note = 2'-O-methyl modified nucleotide
  modified_base 19: mod_base = OTHER; note = Nucleotide attached to N-acetylgalactosamine
  modified_base 54: mod_base = OTHER; note = Nucleotide with phosphorothioate linkage
  modified_base 73: mod_base = OTHER; note = Nucleotide with phosphorothioate linkage
  modified_base 74: mod_base = OTHER; note = 2'-O-methyl modified nucleotide

SEQ ID NO: 818 - RNA, 75 nt, synthetic construct; identical to SEQ ID NO: 633
  source 1..75: mol_type = other RNA
  modified_base 1: mod_base = OTHER; note = 2'-O-methyl modified nucleotide with phosphorothioate linkage
  modified_base 2: mod_base = OTHER; note = 2'-O-methyl modified nucleotide with phosphorothioate linkage
  modified_base 12: mod_base = OTHER; note = Nucleotide with phosphorothioate linkage
  modified_base 13: mod_base = OTHER; note = 2'-fluoro modified nucleotide with phosphorothioate linkage
  modified_base 19: mod_base = OTHER; note = Nucleotide attached to N-acetylgalactosamine
  modified_base 23: mod_base = OTHER; note = Nucleotide with phosphorothioate linkage
  modified_base 24: mod_base = OTHER; note = 2'-fluoro modified nucleotide
  modified_base 43: mod_base = OTHER; note = 2'-fluoro modified nucleotide
  modified_base 51: mod_base = OTHER; note = Nucleotide with phosphorothioate linkage
  modified_base 58: mod_base = OTHER; note = 2'-O-methyl modified nucleotide with phosphorothioate linkage
  modified_base 60: mod_base = OTHER; note = 2'-fluoro modified nucleotide
  modified_base 67: mod_base = OTHER; note = 2'-fluoro modified nucleotide
  modified_base 69: mod_base = OTHER; note = 2'-fluoro modified nucleotide
  modified_base 73: mod_base = OTHER; note = Nucleotide with phosphorothioate linkage
  modified_base 74: mod_base = OTHER; note = 2'-O-methyl modified nucleotide

SEQ ID NO: 819 - RNA, 75 nt, synthetic construct; identical to SEQ ID NO: 633
  source 1..75: mol_type = other RNA
  modified_base 1: mod_base = OTHER; note = 2'-O-methyl modified nucleotide with phosphorothioate linkage
  modified_base 2: mod_base = OTHER; note = 2'-O-methyl modified nucleotide with phosphorothioate linkage
  modified_base 14: mod_base = OTHER; note = 2'-fluoro modified nucleotide
  modified_base 16: mod_base = OTHER; note = 2'-fluoro modified nucleotide
  modified_base 19: mod_base = OTHER; note = Nucleotide attached to N-acetylgalactosamine
  modified_base 22: mod_base = OTHER; note = 2'-fluoro modified nucleotide
  modified_base 24: mod_base = OTHER; note = 2'-fluoro modified nucleotide
  modified_base 40: mod_base = OTHER; note = Nucleotide with phosphorothioate linkage
  modified_base 43: mod_base = OTHER; note = 2'-fluoro modified nucleotide
  modified_base 44: mod_base = OTHER; note = 2'-fluoro modified nucleotide
  modified_base 45: mod_base = OTHER; note = 2'-fluoro modified nucleotide with phosphorothioate linkage
  modified_base 51: mod_base = OTHER; note = 2'-fluoro modified nucleotide
  modified_base 60: mod_base = OTHER; note = 2'-fluoro modified nucleotide
  modified_base 73: mod_base = OTHER; note = Nucleotide with phosphorothioate linkage

SEQ ID NO: 820 - RNA, 75 nt, synthetic construct; identical to SEQ ID NO: 633
  source 1..75: mol_type = other RNA
  modified_base 1: mod_base = OTHER; note = 2'-O-methyl modified nucleotide
  modified_base 19: mod_base = OTHER; note = Nucleotide attached to N-acetylgalactosamine
  modified_base 40: mod_base = OTHER; note = 2'-fluoro modified nucleotide
  modified_base 41: mod_base = OTHER; note = 2'-O-methyl modified nucleotide with phosphorothioate linkage
  modified_base 42: mod_base = OTHER; note = 2'-fluoro modified nucleotide
  modified_base 43: mod_base = OTHER; note = 2'-O-methyl modified nucleotide with phosphorothioate linkage
  modified_base 72: mod_base = OTHER; note = 2'-O-methyl modified nucleotide

SEQ ID NO: 821 - RNA, 75 nt, synthetic construct; identical to SEQ ID NO: 633
  source 1..75: mol_type = other RNA
  modified_base 1: mod_base = OTHER; note = 2'-O-methyl modified nucleotide with phosphorothioate linkage
  modified_base 2: mod_base = OTHER; note = 2'-O-methyl modified nucleotide
  modified_base 19: mod_base = OTHER; note = Nucleotide attached to N-acetylgalactosamine
  modified_base 73: mod_base = OTHER; note = Nucleotide with phosphorothioate linkage
  modified_base 74: mod_base = OTHER; note = 2'-O-methyl modified nucleotide

SEQ ID NO: 822 - RNA, 75 nt, synthetic construct; identical to SEQ ID NO: 633
  source 1..75: mol_type = other RNA
  modified_base 1: mod_base = OTHER; note = 2'-O-methyl modified nucleotide with phosphorothioate linkage
  modified_base 2: mod_base = OTHER; note = 2'-O-methyl modified nucleotide
  modified_base 19: mod_base = OTHER; note = Nucleotide attached to N-acetylgalactosamine

SEQ ID NO: 823 - RNA, 75 nt, synthetic construct; identical to SEQ ID NO: 633
  source 1..75: mol_type = other RNA
  modified_base 1: mod_base = OTHER; note = 2'-O-methyl modified nucleotide with phosphorothioate linkage
  modified_base 2: mod_base = OTHER; note = 2'-O-methyl modified nucleotide with phosphorothioate linkage
  modified_base 19: mod_base = OTHER; note = Nucleotide attached to N-acetylgalactosamine
  modified_base 74: mod_base = OTHER; note = Nucleotide with phosphorothioate linkage
  modified_base 75: mod_base = OTHER; note = 2'-O-methyl modified nucleotide

SEQ ID NO: 824 - RNA, 75 nt, synthetic construct; identical to SEQ ID NO: 633
  source 1..75: mol_type = other RNA
  modified_base 1: mod_base = OTHER; note = 2'-O-methyl modified nucleotide with phosphorothioate linkage
  modified_base 2: mod_base = OTHER; note = 2'-O-methyl modified nucleotide with phosphorothioate linkage
  modified_base 19: mod_base = OTHER; note = Nucleotide attached to N-acetylgalactosamine
  modified_base 51: mod_base = OTHER; note = Nucleotide with phosphorothioate linkage
  modified_base 73: mod_base = OTHER; note = Nucleotide with phosphorothioate linkage
  modified_base 74: mod_base = OTHER; note = 2'-O-methyl modified nucleotide

SEQ ID NO: 825 - RNA, 75 nt, synthetic construct; identical to SEQ ID NO: 633
  source 1..75: mol_type = other RNA
  modified_base 1: mod_base = OTHER; note = 2'-O-methyl modified nucleotide with phosphorothioate linkage
  modified_base 2: mod_base = OTHER; note = 2'-O-methyl modified nucleotide with phosphorothioate linkage
  modified_base 13: mod_base = OTHER; note = 2'-fluoro modified nucleotide
  modified_base 14: mod_base = OTHER; note = 2'-fluoro modified nucleotide
  modified_base 19: mod_base = OTHER; note = Nucleotide attached to N-acetylgalactosamine
  modified_base 53: mod_base = OTHER; note = 2'-fluoro modified nucleotide
  modified_base 58: mod_base = OTHER; note = 2'-O-methyl modified nucleotide
  modified_base 74: mod_base = OTHER; note = Nucleotide with phosphorothioate linkage
  modified_base 75: mod_base = OTHER; note = 2'-O-methyl modified nucleotide

SEQ ID NO: 826 - RNA, 75 nt, synthetic construct; identical to SEQ ID NO: 633
  source 1..75: mol_type = other RNA
  modified_base 1: mod_base = OTHER; note = 2'-O-methyl modified nucleotide with phosphorothioate linkage
  modified_base 2: mod_base = OTHER; note = 2'-O-methyl modified nucleotide
  modified_base 19: mod_base = OTHER; note = Nucleotide attached to N-acetylgalactosamine
  modified_base 46: mod_base = OTHER; note = 2'-fluoro modified nucleotide
  modified_base 58: mod_base = OTHER; note = 2'-O-methyl modified nucleotide
  modified_base 74: mod_base = OTHER; note = Nucleotide with phosphorothioate linkage
  modified_base 75: mod_base = OTHER; note = 2'-O-methyl modified nucleotide

SEQ ID NO: 827 - RNA, 75 nt, synthetic construct; identical to SEQ ID NO: 633
  source 1..75: mol_type = other RNA
  modified_base 1: mod_base = OTHER; note = 2'-O-methyl modified nucleotide with phosphorothioate linkage
  modified_base 2: mod_base = OTHER; note = 2'-O-methyl modified nucleotide
  modified_base 13: mod_base = OTHER; note = Nucleotide with phosphorothioate linkage
  modified_base 14: mod_base = OTHER; note = 2'-O-methyl modified nucleotide
  modified_base 47: mod_base = OTHER; note = Nucleotide attached to N-acetylgalactosamine
  modified_base 54: mod_base = OTHER; note = Nucleotide with phosphorothioate linkage
  modified_base 73: mod_base = OTHER; note = Nucleotide with phosphorothioate linkage
  modified_base 74: mod_base = OTHER; note = 2'-O-methyl modified nucleotide

SEQ ID NO: 828 - RNA, 75 nt, synthetic construct; identical to SEQ ID NO: 633
  source 1..75: mol_type = other RNA
  modified_base 1: mod_base = OTHER; note = 2'-O-methyl modified nucleotide with phosphorothioate linkage
  modified_base 2: mod_base = OTHER; note = 2'-O-methyl modified nucleotide with phosphorothioate linkage
  modified_base 12: mod_base = OTHER; note = Nucleotide with phosphorothioate linkage
  modified_base 13: mod_base = OTHER; note = 2'-fluoro modified nucleotide with phosphorothioate linkage
  modified_base 23: mod_base = OTHER; note = Nucleotide with phosphorothioate linkage
  modified_base 24: mod_base = OTHER; note = 2'-fluoro modified nucleotide
  modified_base 43: mod_base = OTHER; note = 2'-fluoro modified nucleotide
  modified_base 47: mod_base = OTHER; note = Nucleotide attached to N-acetylgalactosamine
  modified_base 51: mod_base = OTHER; note = Nucleotide with phosphorothioate linkage
  modified_base 58: mod_base = OTHER; note = 2'-O-methyl modified nucleotide with phosphorothioate linkage
  modified_base 60: mod_base = OTHER; note = 2'-fluoro modified nucleotide
  modified_base 67: mod_base = OTHER; note = 2'-fluoro modified nucleotide
  modified_base 69: mod_base = OTHER; note = 2'-fluoro modified nucleotide
  modified_base 73: mod_base = OTHER; note = Nucleotide with phosphorothioate linkage
  modified_base 74: mod_base = OTHER; note = 2'-O-methyl modified nucleotide

SEQ ID NO: 829 - RNA, 75 nt, synthetic construct; identical to SEQ ID NO: 633
  source 1..75: mol_type = other RNA
  modified_base 1: mod_base = OTHER; note = 2'-O-methyl modified nucleotide with phosphorothioate linkage
  modified_base 2: mod_base = OTHER; note = 2'-O-methyl modified nucleotide with phosphorothioate linkage
  modified_base 14: mod_base = OTHER; note = 2'-fluoro modified nucleotide
  modified_base 16: mod_base = OTHER; note = 2'-fluoro modified nucleotide
  modified_base 22: mod_base = OTHER; note = 2'-fluoro modified nucleotide
  modified_base 24: mod_base = OTHER; note = 2'-fluoro modified nucleotide
  modified_base 40: mod_base = OTHER; note = Nucleotide with phosphorothioate linkage
  modified_base 43: mod_base = OTHER; note = 2'-fluoro modified nucleotide
  modified_base 44: mod_base = OTHER; note = 2'-fluoro modified nucleotide
  modified_base 45: mod_base = OTHER; note = 2'-fluoro modified nucleotide with phosphorothioate linkage
  modified_base 47: mod_base = OTHER; note = Nucleotide attached to N-acetylgalactosamine
  modified_base 51: mod_base = OTHER; note = 2'-fluoro modified nucleotide
  modified_base 60: mod_base = OTHER; note = 2'-fluoro modified nucleotide
  modified_base 73: mod_base = OTHER; note = Nucleotide with phosphorothioate linkage

SEQ ID NO: 830 - RNA, 75 nt, synthetic construct; identical to SEQ ID NO: 633
  source 1..75: mol_type = other RNA
  modified_base 1: mod_base = OTHER; note = 2'-O-methyl modified nucleotide
  modified_base 40: mod_base = OTHER; note = 2'-fluoro modified nucleotide
  modified_base 41: mod_base = OTHER; note = 2'-O-methyl modified nucleotide with phosphorothioate linkage
  modified_base 42: mod_base = OTHER; note = 2'-fluoro modified nucleotide
  modified_base 43: mod_base = OTHER; note = 2'-O-methyl modified nucleotide with phosphorothioate linkage
  modified_base 47: mod_base = OTHER; note = Nucleotide attached to N-acetylgalactosamine
  modified_base 72: mod_base = OTHER; note = 2'-O-methyl modified nucleotide

SEQ ID NO: 831 - RNA, 75 nt, synthetic construct; identical to SEQ ID NO: 633
  source 1..75: mol_type = other RNA
  modified_base 1: mod_base = OTHER; note = 2'-O-methyl modified nucleotide with phosphorothioate linkage
  modified_base 2: mod_base = OTHER; note = 2'-O-methyl modified nucleotide
  modified_base 47: mod_base = OTHER; note = Nucleotide attached to N-acetylgalactosamine
  modified_base 73: mod_base = OTHER; note = Nucleotide with phosphorothioate linkage
  modified_base 74: mod_base = OTHER; note = 2'-O-methyl modified nucleotide

SEQ ID NO: 832 - RNA, 75 nt, synthetic construct; identical to SEQ ID NO: 633
  source 1..75: mol_type = other RNA
  modified_base 1: mod_base = OTHER; note = 2'-O-methyl modified nucleotide with phosphorothioate linkage
  modified_base 2: mod_base = OTHER; note = 2'-O-methyl modified nucleotide
  modified_base 47: mod_base = OTHER; note = Nucleotide attached to N-acetylgalactosamine

SEQ ID NO: 833 - RNA, 75 nt, synthetic construct; identical to SEQ ID NO: 633
  source 1..75: mol_type = other RNA
  modified_base 1: mod_base = OTHER; note = 2'-O-methyl modified nucleotide with phosphorothioate linkage
  modified_base 2: mod_base = OTHER; note = 2'-O-methyl modified nucleotide with phosphorothioate linkage
  modified_base 47: mod_base = OTHER; note = Nucleotide attached to N-acetylgalactosamine
  modified_base 74: mod_base = OTHER; note = Nucleotide with phosphorothioate linkage
  modified_base 75: mod_base = OTHER; note = 2'-O-methyl modified nucleotide

SEQ ID NO: 834 - RNA, 75 nt, synthetic construct; identical to SEQ ID NO: 633
  source 1..75: mol_type = other RNA
  modified_base 1: mod_base = OTHER; note = 2'-O-methyl modified nucleotide with phosphorothioate linkage
  modified_base 2: mod_base = OTHER; note = 2'-O-methyl modified nucleotide with phosphorothioate linkage
  modified_base 47: mod_base = OTHER; note = Nucleotide attached to N-acetylgalactosamine
  modified_base 51: mod_base = OTHER; note = Nucleotide with phosphorothioate linkage
  modified_base 73: mod_base = OTHER; note = Nucleotide with phosphorothioate linkage
  modified_base 74: mod_base = OTHER; note = 2'-O-methyl modified nucleotide

SEQ ID NO: 835 - RNA, 75 nt, synthetic construct; identical to SEQ ID NO: 633
  source 1..75: mol_type = other RNA
  modified_base 1: mod_base = OTHER; note = 2'-O-methyl modified nucleotide with phosphorothioate linkage
  modified_base 2: mod_base = OTHER; note = 2'-O-methyl modified nucleotide with phosphorothioate linkage
  modified_base 13: mod_base = OTHER; note = 2'-fluoro modified nucleotide
  modified_base 14: mod_base = OTHER; note = 2'-fluoro modified nucleotide
  modified_base 47: mod_base = OTHER; note = Nucleotide attached to N-acetylgalactosamine
  modified_base 53: mod_base = OTHER; note = 2'-fluoro modified nucleotide
  modified_base 58: mod_base = OTHER; note = 2'-O-methyl modified nucleotide
  modified_base 74: mod_base = OTHER; note = Nucleotide with phosphorothioate linkage
  modified_base 75: mod_base = OTHER; note = 2'-O-methyl modified nucleotide

SEQ ID NO: 836 - RNA, 75 nt, synthetic construct; identical to SEQ ID NO: 633
  source 1..75: mol_type = other RNA
  modified_base 1: mod_base = OTHER; note = 2'-O-methyl modified nucleotide with phosphorothioate linkage
  modified_base 2: mod_base = OTHER; note = 2'-O-methyl modified nucleotide
  modified_base 46: mod_base = OTHER; note = 2'-fluoro modified nucleotide
  modified_base 47: mod_base = OTHER; note = Nucleotide attached to N-acetylgalactosamine
  modified_base 58: mod_base = OTHER; note = 2'-O-methyl modified nucleotide
  modified_base 74: mod_base = OTHER; note = Nucleotide with phosphorothioate linkage
  modified_base 75: mod_base = OTHER; note = 2'-O-methyl modified nucleotide

SEQ ID NO: 837 - RNA, 75 nt, synthetic construct; identical to SEQ ID NO: 633
  source 1..75: mol_type = other RNA
  modified_base 1: mod_base = OTHER; note = 2'-O-methyl modified nucleotide with phosphorothioate linkage attached to cyanine3 dye
  modified_base 2: mod_base = OTHER; note = 2'-O-methyl modified nucleotide
  modified_base 13: mod_base = OTHER; note = Nucleotide with phosphorothioate linkage
  modified_base 14: mod_base = OTHER; note = 2'-O-methyl modified nucleotide
  modified_base 16: mod_base = OTHER; note = Nucleotide attached to N-acetylgalactosamine
  modified_base 54: mod_base = OTHER; note = Nucleotide with phosphorothioate linkage
  modified_base 73: mod_base = OTHER; note = Nucleotide with phosphorothioate linkage
  modified_base 74: mod_base = OTHER; note = 2'-O-methyl modified nucleotide

SEQ ID NO: 838 - RNA, 75 nt, synthetic construct; identical to SEQ ID NO: 633
  source 1..75: mol_type = other RNA
  modified_base 1: mod_base = OTHER; note = 2'-O-methyl modified nucleotide with phosphorothioate linkage attached to cyanine3 dye
  modified_base 2: mod_base = OTHER; note = 2'-O-methyl modified nucleotide with phosphorothioate linkage
  modified_base 12: mod_base = OTHER; note = Nucleotide with phosphorothioate linkage
  modified_base 13: mod_base = OTHER; note = 2'-fluoro modified nucleotide with phosphorothioate linkage
  modified_base 16: mod_base = OTHER; note = Nucleotide attached to N-acetylgalactosamine
  modified_base 23: mod_base = OTHER; note = Nucleotide with phosphorothioate linkage
  modified_base 24: mod_base = OTHER; note = 2'-fluoro modified nucleotide
  modified_base 43: mod_base = OTHER; note = 2'-fluoro modified nucleotide
  modified_base 51: mod_base = OTHER; note = Nucleotide with phosphorothioate linkage
  modified_base 58: mod_base = OTHER; note = 2'-O-methyl modified nucleotide with phosphorothioate linkage
  modified_base 60: mod_base = OTHER; note = 2'-fluoro modified nucleotide
  modified_base 67: mod_base = OTHER; note = 2'-fluoro modified nucleotide
  modified_base 69: mod_base = OTHER; note = 2'-fluoro modified nucleotide
  modified_base 73: mod_base = OTHER; note = Nucleotide with phosphorothioate linkage
  modified_base 74: mod_base = OTHER; note = 2'-O-methyl modified nucleotide

SEQ ID NO: 839 - RNA, 75 nt, synthetic construct; identical to SEQ ID NO: 633
  source 1..75: mol_type = other RNA
  modified_base 1: mod_base = OTHER; note = 2'-O-methyl modified nucleotide with phosphorothioate linkage attached to cyanine3 dye
  modified_base 2: mod_base = OTHER; note = 2'-O-methyl modified nucleotide with phosphorothioate linkage
  modified_base 14: mod_base = OTHER; note = 2'-fluoro modified nucleotide
  modified_base 16: mod_base = OTHER; note = 2'-fluoro modified nucleotide attached to N-acetylgalactosamine
  modified_base 22: mod_base = OTHER; note = 2'-fluoro modified nucleotide
  modified_base 24: mod_base = OTHER; note = 2'-fluoro modified nucleotide
  modified_base 40: mod_base = OTHER; note = Nucleotide with phosphorothioate linkage
  modified_base 43: mod_base = OTHER; note = 2'-fluoro modified nucleotide
  modified_base 44: mod_base = OTHER; note = 2'-fluoro modified nucleotide
  modified_base 45: mod_base = OTHER; note = 2'-fluoro modified nucleotide with phosphorothioate linkage
  modified_base 51: mod_base = OTHER; note = 2'-fluoro modified nucleotide
  modified_base 60: mod_base = OTHER; note = 2'-fluoro modified nucleotide
  modified_base 73: mod_base = OTHER; note = Nucleotide with phosphorothioate linkage

SEQ ID NO: 840 - RNA, 75 nt, synthetic construct; identical to SEQ ID NO: 633
  source 1..75: mol_type = other RNA
  modified_base 1: mod_base = OTHER; note = 2'-O-methyl modified nucleotide attached to cyanine3 dye
  modified_base 16: mod_base = OTHER; note = Nucleotide attached to N-acetylgalactosamine
  modified_base 40: mod_base = OTHER; note = 2'-fluoro modified nucleotide
  modified_base 41: mod_base = OTHER; note = 2'-O-methyl modified nucleotide with phosphorothioate linkage
  modified_base 42: mod_base = OTHER; note = 2'-fluoro modified nucleotide
  modified_base 43: mod_base = OTHER; note = 2'-O-methyl modified nucleotide with phosphorothioate linkage
  modified_base 72: mod_base = OTHER; note = 2'-O-methyl modified nucleotide

SEQ ID NO: 841 - RNA, 75 nt, synthetic construct; identical to SEQ ID NO: 633
  source 1..75: mol_type = other RNA
  modified_base 1: mod_base = OTHER; note = 2'-O-methyl modified nucleotide with phosphorothioate linkage attached to cyanine3 dye
  modified_base 2: mod_base = OTHER; note = 2'-O-methyl modified nucleotide
  modified_base 16: mod_base = OTHER; note = Nucleotide attached to N-acetylgalactosamine
  modified_base 73: mod_base = OTHER; note = Nucleotide with phosphorothioate linkage
  modified_base 74: mod_base = OTHER; note = 2'-O-methyl modified nucleotide

SEQ ID NO: 842 - RNA, 75 nt, synthetic construct; identical to SEQ ID NO: 633
  source 1..75: mol_type = other RNA
  modified_base 1: mod_base = OTHER; note = 2'-O-methyl modified nucleotide with phosphorothioate linkage attached to cyanine3 dye
  modified_base 2: mod_base = OTHER; note = 2'-O-methyl modified nucleotide
  modified_base 16: mod_base = OTHER; note = Nucleotide attached to N-acetylgalactosamine

SEQ ID NO: 843 - RNA, 75 nt, synthetic construct; identical to SEQ ID NO: 633
  source 1..75: mol_type = other RNA
  modified_base 1: mod_base = OTHER; note = 2'-O-methyl modified nucleotide with phosphorothioate linkage attached to cyanine3 dye
  modified_base 2: mod_base = OTHER; note = 2'-O-methyl modified nucleotide with phosphorothioate linkage
  modified_base 16: mod_base = OTHER; note = Nucleotide attached to N-acetylgalactosamine
  modified_base 74: mod_base = OTHER; note = Nucleotide with phosphorothioate linkage
  modified_base 75: mod_base = OTHER; note = 2'-O-methyl modified nucleotide

SEQ ID NO: 844 - RNA, 75 nt, synthetic construct; identical to SEQ ID NO: 633
  source 1..75: mol_type = other RNA
  modified_base 1: mod_base = OTHER; note = 2'-O-methyl modified nucleotide with phosphorothioate linkage attached to cyanine3 dye
  modified_base 2: mod_base = OTHER; note = 2'-O-methyl modified nucleotide with phosphorothioate linkage
  modified_base 16: mod_base = OTHER; note = Nucleotide attached to N-acetylgalactosamine
  modified_base 51: mod_base = OTHER; note = Nucleotide with phosphorothioate linkage
  modified_base 73: mod_base = OTHER; note = Nucleotide with phosphorothioate linkage
  modified_base 74: mod_base = OTHER; note = 2'-O-methyl modified nucleotide

SEQ ID NO: 845 - RNA, 75 nt, synthetic construct; identical to SEQ ID NO: 633
  source 1..75: mol_type = other RNA
  modified_base 1: mod_base = OTHER; note = 2'-O-methyl modified nucleotide with phosphorothioate linkage attached to cyanine3 dye
  modified_base 2: mod_base = OTHER; note = 2'-O-methyl modified nucleotide with phosphorothioate linkage
  modified_base 13: mod_base = OTHER; note = 2'-fluoro modified nucleotide
  modified_base 14: mod_base = OTHER; note = 2'-fluoro modified nucleotide
  modified_base 16: mod_base = OTHER; note = Nucleotide attached to N-acetylgalactosamine
  modified_base 53: mod_base = OTHER; note = 2'-fluoro modified nucleotide
  modified_base 58: mod_base = OTHER; note = 2'-O-methyl modified nucleotide
  modified_base 74: mod_base = OTHER; note = Nucleotide with phosphorothioate linkage
  modified_base 75: mod_base = OTHER; note = 2'-O-methyl modified nucleotide

SEQ ID NO: 846 - RNA, 75 nt, synthetic construct; identical to SEQ ID NO: 633
  source 1..75: mol_type = other RNA
  modified_base 1: mod_base = OTHER; note = 2'-O-methyl modified nucleotide with phosphorothioate linkage attached to cyanine3 dye
  modified_base 2: mod_base = OTHER; note = 2'-O-methyl modified nucleotide
  modified_base 16: mod_base = OTHER; note = Nucleotide attached to N-acetylgalactosamine
  modified_base 46: mod_base = OTHER; note = 2'-fluoro modified nucleotide
  modified_base 58: mod_base = OTHER; note = 2'-O-methyl modified nucleotide
  modified_base 74: mod_base = OTHER; note = Nucleotide with phosphorothioate linkage
  modified_base 75: mod_base = OTHER; note = 2'-O-methyl modified nucleotide

SEQ ID NO: 847 - RNA, 75 nt, synthetic construct; identical to SEQ ID NO: 633
  source 1..75: mol_type = other RNA
  modified_base 1: mod_base = OTHER; note = 2'-O-methyl modified nucleotide with phosphorothioate linkage attached to cyanine3 dye
  modified_base 2: mod_base = OTHER; note = 2'-O-methyl modified nucleotide
  modified_base 13: mod_base = OTHER; note = Nucleotide with phosphorothioate linkage
  modified_base 14: mod_base = OTHER; note = 2'-O-methyl modified nucleotide
  modified_base 19: mod_base = OTHER; note = Nucleotide attached to N-acetylgalactosamine
  modified_base 54: mod_base = OTHER; note = Nucleotide with phosphorothioate linkage
  modified_base 73: mod_base = OTHER; note = Nucleotide with phosphorothioate linkage
  modified_base 74: mod_base = OTHER; note = 2'-O-methyl modified nucleotide

SEQ ID NO: 848 - RNA, 75 nt, synthetic construct; identical to SEQ ID NO: 633
  source 1..75: mol_type = other RNA
  modified_base 1: mod_base = OTHER; note = 2'-O-methyl modified nucleotide with phosphorothioate linkage attached to cyanine3 dye
  modified_base 2: mod_base = OTHER; note = 2'-O-methyl modified nucleotide with phosphorothioate linkage
  modified_base 12: mod_base = OTHER; note = Nucleotide with phosphorothioate linkage
  modified_base 13: mod_base = OTHER; note = 2'-fluoro modified nucleotide with phosphorothioate linkage
  modified_base 19: mod_base = OTHER; note = Nucleotide attached to N-acetylgalactosamine
  modified_base 23: mod_base = OTHER; note = Nucleotide with phosphorothioate linkage
  modified_base 24: mod_base = OTHER; note = 2'-fluoro modified nucleotide
  modified_base 43: mod_base = OTHER; note = 2'-fluoro modified nucleotide
  modified_base 51: mod_base = OTHER; note = Nucleotide with phosphorothioate linkage
  modified_base 58: mod_base = OTHER; note = 2'-O-methyl modified nucleotide with phosphorothioate linkage
  modified_base 60: mod_base = OTHER; note = 2'-fluoro modified nucleotide
  modified_base 67: mod_base = OTHER; note = 2'-fluoro modified nucleotide
  modified_base 69: mod_base = OTHER; note = 2'-fluoro modified nucleotide
  modified_base 73: mod_base = OTHER; note = Nucleotide with phosphorothioate linkage
  modified_base 74: mod_base = OTHER; note = 2'-O-methyl modified nucleotide

SEQ ID NO: 849 - RNA, 75 nt, synthetic construct; identical to SEQ ID NO: 633
  source 1..75: mol_type = other RNA
  modified_base 1: mod_base = OTHER; note = 2'-O-methyl modified nucleotide with phosphorothioate linkage attached to cyanine3 dye
  modified_base 2: mod_base = OTHER; note = 2'-O-methyl modified nucleotide with phosphorothioate linkage
  modified_base 14: mod_base = OTHER; note = 2'-fluoro modified nucleotide
  modified_base 16: mod_base = OTHER; note = 2'-fluoro modified nucleotide
  modified_base 19: mod_base = OTHER; note = Nucleotide attached to N-acetylgalactosamine
  modified_base 22: mod_base = OTHER; note = 2'-fluoro modified nucleotide
  modified_base 24: mod_base = OTHER; note = 2'-fluoro modified nucleotide
  modified_base 40: mod_base = OTHER; note = Nucleotide with phosphorothioate linkage
  modified_base 43: mod_base = OTHER; note = 2'-fluoro modified nucleotide
  modified_base 44: mod_base = OTHER; note = 2'-fluoro modified nucleotide
  modified_base 45: mod_base = OTHER; note = 2'-fluoro modified nucleotide with phosphorothioate linkage
  modified_base 51: mod_base = OTHER; note = 2'-fluoro modified nucleotide
  modified_base 60: mod_base = OTHER; note = 2'-fluoro modified nucleotide
  modified_base 73: mod_base = OTHER; note = Nucleotide with phosphorothioate linkage

SEQ ID NO: 850 - RNA, 75 nt, synthetic construct; identical to SEQ ID NO: 633
  source 1..75: mol_type = other RNA
  modified_base 1: mod_base = OTHER; note = 2'-O-methyl modified nucleotide attached to cyanine3 dye
  modified_base 19: mod_base = OTHER; note = Nucleotide attached to N-acetylgalactosamine
  modified_base 40: mod_base = OTHER; note = 2'-fluoro modified nucleotide
  modified_base 41: mod_base = OTHER; note = 2'-O-methyl modified nucleotide with phosphorothioate linkage
  modified_base 42: mod_base = OTHER; note = 2'-fluoro modified nucleotide
  modified_base 43: mod_base = OTHER; note = 2'-O-methyl modified nucleotide with phosphorothioate linkage
  modified_base 72: mod_base = OTHER; note = 2'-O-methyl modified nucleotide

SEQ ID NO: 851 - RNA, 75 nt, synthetic construct; identical to SEQ ID NO: 633
  source 1..75: mol_type = other RNA
  modified_base 1: mod_base = OTHER; note = 2'-O-methyl modified nucleotide with phosphorothioate linkage attached to cyanine3 dye
  modified_base 2: mod_base = OTHER; note = 2'-O-methyl modified nucleotide
  modified_base 19: mod_base = OTHER; note = Nucleotide attached to N-acetylgalactosamine
  modified_base 73: mod_base = OTHER; note = Nucleotide with phosphorothioate linkage
  modified_base 74: mod_base = OTHER; note = 2'-O-methyl modified nucleotide

SEQ ID NO: 852 - RNA, 75 nt, synthetic construct; identical to SEQ ID NO: 633
  source 1..75: mol_type = other RNA
  modified_base 1: mod_base = OTHER; note = 2'-O-methyl modified nucleotide with phosphorothioate linkage attached to cyanine3 dye
  modified_base 2: mod_base = OTHER; note = 2'-O-methyl modified nucleotide
  modified_base 19: mod_base = OTHER; note = Nucleotide attached to N-acetylgalactosamine

SEQ ID NO: 853 - RNA, 75 nt, synthetic construct; identical to SEQ ID NO: 633
  source 1..75: mol_type = other RNA
  modified_base 1: mod_base = OTHER; note = 2'-O-methyl modified nucleotide with phosphorothioate linkage attached to cyanine3 dye
  modified_base 2: mod_base = OTHER; note = 2'-O-methyl modified nucleotide with phosphorothioate linkage
  modified_base 19: mod_base = OTHER; note = Nucleotide attached to N-acetylgalactosamine
  modified_base 74: mod_base = OTHER; note = Nucleotide with phosphorothioate linkage
  modified_base 75: mod_base = OTHER; note = 2'-O-methyl modified nucleotide

SEQ ID NO: 854 - RNA, 75 nt, synthetic construct; identical to SEQ ID NO: 633
  source 1..75: mol_type = other RNA
  modified_base 1: mod_base = OTHER; note = 2'-O-methyl modified nucleotide with phosphorothioate linkage attached to cyanine3 dye
  modified_base 2: mod_base = OTHER; note = 2'-O-methyl modified nucleotide with phosphorothioate linkage
  modified_base 19: mod_base = OTHER; note = Nucleotide attached to N-acetylgalactosamine
  modified_base 51: mod_base = OTHER; note = Nucleotide with phosphorothioate linkage
  modified_base 73: mod_base = OTHER; note = Nucleotide with phosphorothioate linkage
  modified_base 74: mod_base = OTHER; note = 2'-O-methyl modified nucleotide

SEQ ID NO: 855 - RNA, 75 nt, synthetic construct; identical to SEQ ID NO: 633
  source 1..75: mol_type = other RNA
  modified_base 1: mod_base = OTHER; note = 2'-O-methyl modified nucleotide with phosphorothioate linkage attached to cyanine3 dye
  modified_base 2: mod_base = OTHER; note = 2'-O-methyl modified nucleotide with phosphorothioate linkage
  modified_base 13: mod_base = OTHER; note = 2'-fluoro modified nucleotide
  modified_base 14: mod_base = OTHER; note = 2'-fluoro modified nucleotide
  modified_base 19: mod_base = OTHER; note = Nucleotide attached to N-acetylgalactosamine
  modified_base 53: mod_base = OTHER; note = 2'-fluoro modified nucleotide
  modified_base 58: mod_base = OTHER; note = 2'-O-methyl modified nucleotide
  modified_base 74: mod_base = OTHER; note = Nucleotide with phosphorothioate linkage
  modified_base 75: mod_base = OTHER; note = 2'-O-methyl modified nucleotide

SEQ ID NO: 856 - RNA, 75 nt, synthetic construct; identical to SEQ ID NO: 633
  source 1..75: mol_type = other RNA
  modified_base 1: mod_base = OTHER; note = 2'-O-methyl modified nucleotide with phosphorothioate linkage attached to cyanine3 dye
  modified_base 2: mod_base = OTHER; note = 2'-O-methyl modified nucleotide
  modified_base 19: mod_base = OTHER; note = Nucleotide attached to N-acetylgalactosamine
  modified_base 46: mod_base = OTHER; note = 2'-fluoro modified nucleotide
  modified_base 58: mod_base = OTHER; note = 2'-O-methyl modified nucleotide
  modified_base 74: mod_base = OTHER; note = Nucleotide with phosphorothioate linkage
  modified_base 75: mod_base = OTHER; note = 2'-O-methyl modified nucleotide

SEQ ID NO: 857 - RNA, 75 nt, synthetic construct; identical to SEQ ID NO: 633
  source 1..75: mol_type = other RNA
  modified_base 1: mod_base = OTHER; note = 2'-O-methyl modified nucleotide with phosphorothioate linkage attached to cyanine3 dye
  modified_base 2: mod_base = OTHER; note = 2'-O-methyl modified nucleotide
  modified_base 13: mod_base = OTHER; note = Nucleotide with phosphorothioate linkage
  modified_base 14: mod_base = OTHER; note = 2'-O-methyl modified nucleotide
  modified_base 47: mod_base = OTHER; note = Nucleotide attached to N-acetylgalactosamine
  modified_base 54: mod_base = OTHER; note = Nucleotide with phosphorothioate linkage
  modified_base 73: mod_base = OTHER; note = Nucleotide with phosphorothioate linkage
  modified_base 74: mod_base = OTHER; note = 2'-O-methyl modified nucleotide

SEQ ID NO: 858 - RNA, 75 nt, synthetic construct; identical to SEQ ID NO: 633
  source 1..75: mol_type = other RNA
  modified_base 1: mod_base = OTHER; note = 2'-O-methyl modified nucleotide with phosphorothioate linkage attached to cyanine3 dye
  modified_base 2: mod_base = OTHER; note = 2'-O-methyl modified nucleotide with phosphorothioate linkage
  modified_base 12: mod_base = OTHER; note = Nucleotide with phosphorothioate linkage
  modified_base 13: mod_base = OTHER; note = 2'-fluoro modified nucleotide with phosphorothioate linkage
  modified_base 23: mod_base = OTHER; note = Nucleotide with phosphorothioate linkage
  modified_base 24: mod_base = OTHER; note = 2'-fluoro modified nucleotide
  modified_base 43: mod_base = OTHER; note = 2'-fluoro modified nucleotide
  modified_base 47: mod_base = OTHER; note = Nucleotide attached to N-acetylgalactosamine
  modified_base 51: mod_base = OTHER; note = Nucleotide with phosphorothioate linkage
  modified_base 58: mod_base = OTHER; note = 2'-O-methyl modified nucleotide with phosphorothioate linkage
  modified_base 60: mod_base = OTHER; note = 2'-fluoro modified nucleotide
  modified_base 67: mod_base = OTHER; note = 2'-fluoro modified nucleotide
  modified_base 69: mod_base = OTHER; note = 2'-fluoro modified nucleotide
  modified_base 73: mod_base = OTHER; note = Nucleotide with phosphorothioate linkage
  modified_base 74: mod_base = OTHER; note = 2'-O-methyl modified nucleotide

SEQ ID NO: 859 - RNA, 75 nt, synthetic construct; identical to SEQ ID NO: 633
  source 1..75: mol_type = other RNA
  modified_base 1: mod_base = OTHER; note = 2'-O-methyl modified nucleotide with phosphorothioate linkage attached to cyanine3 dye
  modified_base 2: mod_base = OTHER; note = 2'-O-methyl modified nucleotide with phosphorothioate linkage
  modified_base 14: mod_base = OTHER; note = 2'-fluoro modified nucleotide
  modified_base 16: mod_base = OTHER; note = 2'-fluoro modified nucleotide
  modified_base 22: mod_base = OTHER; note = 2'-fluoro modified nucleotide
  modified_base 24: mod_base = OTHER; note = 2'-fluoro modified nucleotide
  modified_base 40: mod_base = OTHER; note = Nucleotide with phosphorothioate linkage
  modified_base 43: mod_base = OTHER; note = 2'-fluoro modified nucleotide
  modified_base 44: mod_base = OTHER; note = 2'-fluoro modified nucleotide
  modified_base 45: mod_base = OTHER; note = 2'-fluoro modified nucleotide with phosphorothioate linkage
  modified_base 47: mod_base = OTHER; note = Nucleotide attached to N-acetylgalactosamine
  modified_base 51: mod_base = OTHER; note = 2'-fluoro modified nucleotide
  modified_base 60: mod_base = OTHER; note = 2'-fluoro modified nucleotide
  modified_base 73: mod_base = OTHER; note = Nucleotide with phosphorothioate linkage

SEQ ID NO: 860 - RNA, 75 nt, synthetic construct; identical to SEQ ID NO: 633
  source 1..75: mol_type = other RNA
  modified_base 1: mod_base = OTHER; note = 2'-O-methyl modified nucleotide attached to cyanine3 dye
  modified_base 40: mod_base = OTHER; note = 2'-fluoro modified nucleotide
  modified_base 41: mod_base = OTHER; note = 2'-O-methyl modified nucleotide with phosphorothioate linkage
  modified_base 42: mod_base = OTHER; note = 2'-fluoro modified nucleotide
  modified_base 43: mod_base = OTHER; note = 2'-O-methyl modified nucleotide with phosphorothioate linkage
  modified_base 47: mod_base = OTHER; note = Nucleotide attached to N-acetylgalactosamine
  modified_base 72: mod_base = OTHER; note = 2'-O-methyl modified nucleotide

SEQ ID NO: 861 - RNA, 75 nt, synthetic construct; identical to SEQ ID NO: 633
  source 1..75: mol_type = other RNA
  modified_base 1: mod_base = OTHER; note = 2'-O-methyl modified nucleotide with phosphorothioate linkage attached to cyanine3 dye
  modified_base 2: mod_base = OTHER; note = 2'-O-methyl modified nucleotide
  modified_base 47: mod_base = OTHER; note = Nucleotide attached to N-acetylgalactosamine
  modified_base 73: mod_base = OTHER; note = Nucleotide with phosphorothioate linkage
  modified_base 74: mod_base = OTHER; note = 2'-O-methyl modified nucleotide

SEQ ID NO: 862 - RNA, 75 nt, synthetic construct; identical to SEQ ID NO: 633
  source 1..75: mol_type = other RNA
  modified_base 1: mod_base = OTHER; note = 2'-O-methyl modified nucleotide with phosphorothioate linkage attached to cyanine3 dye
  modified_base 2: mod_base = OTHER; note = 2'-O-methyl modified nucleotide
  modified_base 47: mod_base = OTHER; note = Nucleotide attached to N-acetylgalactosamine

SEQ ID NO: 863 - RNA, 75 nt, synthetic construct; identical to SEQ ID NO: 633
  source 1..75: mol_type = other RNA
  modified_base 1: mod_base = OTHER; note = 2'-O-methyl modified nucleotide with phosphorothioate linkage attached to cyanine3 dye
  modified_base 2: mod_base = OTHER; note = 2'-O-methyl modified nucleotide with phosphorothioate linkage
  modified_base 47: mod_base = OTHER; note = Nucleotide attached to N-acetylgalactosamine
  modified_base 74: mod_base = OTHER; note = Nucleotide with phosphorothioate linkage
  modified_base 75: mod_base = OTHER; note = 2'-O-methyl modified nucleotide

SEQ ID NO: 864 - RNA, 75 nt, synthetic construct; identical to SEQ ID NO: 633
  source 1..75: mol_type = other RNA
  modified_base 1: mod_base = OTHER; note = 2'-O-methyl modified nucleotide with phosphorothioate linkage attached to cyanine3 dye
  modified_base 2: mod_base = OTHER; note = 2'-O-methyl modified nucleotide with phosphorothioate linkage
  modified_base 47: mod_base = OTHER; note = Nucleotide attached to N-acetylgalactosamine
  modified_base 51: mod_base = OTHER; note = Nucleotide with phosphorothioate linkage
  modified_base 73: mod_base = OTHER; note = Nucleotide with phosphorothioate linkage
  modified_base 74: mod_base = OTHER; note = 2'-O-methyl modified nucleotide

SEQ ID NO: 865 - RNA, 75 nt, synthetic construct; identical to SEQ ID NO: 633
  source 1..75: mol_type = other RNA
  modified_base 1: mod_base = OTHER; note = 2'-O-methyl modified nucleotide with phosphorothioate linkage attached to cyanine3 dye
  modified_base 2: mod_base = OTHER; note = 2'-O-methyl modified nucleotide with phosphorothioate linkage
  modified_base 13: mod_base = OTHER; note = 2'-fluoro modified nucleotide
  modified_base 14: mod_base = OTHER; note = 2'-fluoro modified nucleotide
  modified_base 47: mod_base = OTHER; note = Nucleotide attached to N-acetylgalactosamine
  modified_base 53: mod_base = OTHER; note = 2'-fluoro modified nucleotide
  modified_base 58: mod_base = OTHER; note = 2'-O-methyl modified nucleotide
  modified_base 74: mod_base = OTHER; note = Nucleotide with phosphorothioate linkage
  modified_base 75: mod_base = OTHER; note = 2'-O-methyl modified nucleotide

SEQ ID NO: 866 - RNA, 75 nt, synthetic construct; identical to SEQ ID NO: 633
  source 1..75: mol_type = other RNA
  modified_base 1: mod_base = OTHER; note = 2'-O-methyl modified nucleotide with phosphorothioate linkage attached to cyanine3 dye
  modified_base 2: mod_base = OTHER; note = 2'-O-methyl modified nucleotide
  modified_base 46: mod_base = OTHER; note = 2'-fluoro modified nucleotide
  modified_base 47: mod_base = OTHER; note = Nucleotide attached to N-acetylgalactosamine
  modified_base 58: mod_base = OTHER; note = 2'-O-methyl modified nucleotide
  modified_base 74: mod_base = OTHER; note = Nucleotide with phosphorothioate linkage
  modified_base 75: mod_base = OTHER; note = 2'-O-methyl modified nucleotide

SEQ ID NO: 867 - RNA, 75 nt, synthetic construct; identical to SEQ ID NO: 633
  source 1..75: mol_type = other RNA
  modified_base 1: mod_base = OTHER; note = 2'-O-methyl modified nucleotide with phosphorothioate linkage
  modified_base 2: mod_base = OTHER; note = 2'-O-methyl modified nucleotide
  modified_base 13: mod_base = OTHER; note = Nucleotide with phosphorothioate linkage
  modified_base 14: mod_base = OTHER; note = 2'-O-methyl modified nucleotide
  modified_base 16: mod_base = OTHER; note = Nucleotide attached to AN1 (C6-U phosphoramidite (5'-Dimethoxytrityl-5-[N-(trifluoroacetylaminohexyl)-3-acry limido]-Uridine, 2'-O-triisopropylsilyloxymethyl-3'-[(2-cyanoethyl)-(N,N-dii sopropyl)]-phosphoramidite))
  modified_base 54: mod_base = OTHER; note = Nucleotide with phosphorothioate linkage
  modified_base 73: mod_base = OTHER; note = Nucleotide with phosphorothioate linkage
  modified_base 74: mod_base = OTHER; note = 2'-O-methyl modified nucleotide

SEQ ID NO: 868 - RNA, 75 nt, synthetic construct; identical to SEQ ID NO: 633
  source 1..75: mol_type = other RNA
  modified_base 1: mod_base = OTHER; note = 2'-O-methyl modified nucleotide with phosphorothioate linkage
  modified_base 2: mod_base = OTHER; note = 2'-O-methyl modified nucleotide with phosphorothioate linkage
  modified_base 12: mod_base = OTHER; note = Nucleotide with phosphorothioate linkage
  modified_base 13: mod_base = OTHER; note = 2'-fluoro modified nucleotide with phosphorothioate linkage
  modified_base 16: mod_base = OTHER; note = Nucleotide attached to AN1 (C6-U phosphoramidite (5'-Dimethoxytrityl-5-[N-(trifluoroacetylaminohexyl)-3-acry limido]-Uridine, 2'-O-triisopropylsilyloxymethyl-3'-[(2-cyanoethyl)-(N,N-dii sopropyl)]-phosphoramidite))
  modified_base 23: mod_base = OTHER; note = Nucleotide with phosphorothioate linkage
  modified_base 24: mod_base = OTHER; note = 2'-fluoro modified nucleotide
  modified_base 43: mod_base = OTHER; note = 2'-fluoro modified nucleotide
  modified_base 51: mod_base = OTHER; note = Nucleotide with phosphorothioate linkage
  modified_base 58: mod_base = OTHER; note = 2'-O-methyl modified nucleotide with phosphorothioate linkage
  modified_base 60: mod_base = OTHER; note = 2'-fluoro modified nucleotide
  modified_base 67: mod_base = OTHER; note = 2'-fluoro modified nucleotide
  modified_base 69: mod_base = OTHER; note = 2'-fluoro modified nucleotide
  modified_base 73: mod_base = OTHER; note = Nucleotide with phosphorothioate linkage
  modified_base 74: mod_base = OTHER; note = 2'-O-methyl modified nucleotide

SEQ ID NO: 869 - RNA, 75 nt, synthetic construct; identical to SEQ ID NO: 633
  source 1..75: mol_type = other RNA
  modified_base 1: mod_base = OTHER; note = 2'-O-methyl modified nucleotide with phosphorothioate linkage
  modified_base 2: mod_base = OTHER; note = 2'-O-methyl modified nucleotide with phosphorothioate linkage
  modified_base 14: mod_base = OTHER; note = 2'-fluoro modified nucleotide
  modified_base 16: mod_base = OTHER; note = 2'-fluoro modified Nucleotide attached to AN1 (C6-U phosphoramidite (5'-Dimethoxytrityl-5-[N-(trifluoroacetylaminohexyl)-3-acry limido]-Uridine, 2'-O-triisopropylsilyloxymethyl-3'-[(2-cyanoethyl)-(N,N-dii sopropyl)]-phosphoramidite))
  modified_base 22: mod_base = OTHER; note = 2'-fluoro modified nucleotide
  modified_base 24: mod_base = OTHER; note = 2'-fluoro modified nucleotide
  modified_base 40: mod_base = OTHER; note = Nucleotide with phosphorothioate linkage
  modified_base 43: mod_base = OTHER; note = 2'-fluoro modified nucleotide
  modified_base 44: mod_base = OTHER; note = 2'-fluoro modified nucleotide
  modified_base 45: mod_base = OTHER; note = 2'-fluoro modified nucleotide with phosphorothioate linkage
  modified_base 51: mod_base = OTHER; note = 2'-fluoro modified nucleotide
  modified_base 60: mod_base = OTHER; note = 2'-fluoro modified nucleotide
  modified_base 73: mod_base = OTHER; note = Nucleotide with phosphorothioate linkage

SEQ ID NO: 870 - RNA, 75 nt, synthetic construct; identical to SEQ ID NO: 633
  source 1..75: mol_type = other RNA
  modified_base 1: mod_base = OTHER; note = 2'-O-methyl modified nucleotide
  modified_base 16: mod_base = OTHER; note = Nucleotide attached to AN1 (C6-U phosphoramidite (5'-Dimethoxytrityl-5-[N-(trifluoroacetylaminohexyl)-3-acry limido]-Uridine, 2'-O-triisopropylsilyloxymethyl-3'-[(2-cyanoethyl)-(N,N-dii sopropyl)]-phosphoramidite))
  modified_base 40: mod_base = OTHER; note = 2'-fluoro modified nucleotide
  modified_base 41: mod_base = OTHER; note = 2'-O-methyl modified nucleotide with phosphorothioate linkage
  modified_base 42: mod_base = OTHER; note = 2'-fluoro modified nucleotide
  modified_base 43: mod_base = OTHER; note = 2'-O-methyl modified nucleotide with phosphorothioate linkage
  modified_base 72: mod_base = OTHER; note = 2'-O-methyl modified nucleotide

SEQ ID NO: 871 - RNA, 75 nt, synthetic construct; identical to SEQ ID NO: 633
  source 1..75: mol_type = other RNA
  modified_base 1: mod_base = OTHER; note = 2'-O-methyl modified nucleotide with phosphorothioate linkage
  modified_base 2: mod_base = OTHER; note = 2'-O-methyl modified nucleotide
  modified_base 16: mod_base = OTHER; note = Nucleotide attached to AN1 (C6-U phosphoramidite (5'-Dimethoxytrityl-5-[N-(trifluoroacetylaminohexyl)-3-acry limido]-Uridine, 2'-O-triisopropylsilyloxymethyl-3'-[(2-cyanoethyl)-(N,N-dii sopropyl)]-phosphoramidite))
  modified_base 73: mod_base = OTHER; note = Nucleotide with phosphorothioate linkage
  modified_base 74: mod_base = OTHER; note = 2'-O-methyl modified nucleotide

SEQ ID NO: 872 - RNA, 75 nt, synthetic construct; identical to SEQ ID NO: 633
  source 1..75: mol_type = other RNA
  modified_base 1: mod_base = OTHER; note = 2'-O-methyl modified nucleotide with phosphorothioate linkage
  modified_base 2: mod_base = OTHER; note = 2'-O-methyl modified nucleotide
  modified_base 16: mod_base = OTHER; note = Nucleotide attached to AN1 (C6-U phosphoramidite (5'-Dimethoxytrityl-5-[N-(trifluoroacetylaminohexyl)-3-acry limido]-Uridine, 2'-O-triisopropylsilyloxymethyl-3'-[(2-cyanoethyl)-(N,N-dii sopropyl)]-phosphoramidite))

SEQ ID NO: 873 - RNA, 75 nt, synthetic construct; identical to SEQ ID NO: 633
  source 1..75: mol_type = other RNA
  modified_base 1: mod_base = OTHER; note = 2'-O-methyl modified nucleotide with phosphorothioate linkage
  modified_base 2: mod_base = OTHER; note = 2'-O-methyl modified nucleotide with phosphorothioate linkage
  modified_base 16: mod_base = OTHER; note = Nucleotide attached to AN1 (C6-U phosphoramidite (5'-Dimethoxytrityl-5-[N-(trifluoroacetylaminohexyl)-3-acry limido]-Uridine, 2'-O-triisopropylsilyloxymethyl-3'-[(2-cyanoethyl)-(N,N-dii sopropyl)]-phosphoramidite))
  modified_base 74: mod_base = OTHER; note = Nucleotide with phosphorothioate linkage
  modified_base 75: mod_base = OTHER; note = 2'-O-methyl modified nucleotide

SEQ ID NO: 874 - RNA, 75 nt, synthetic construct; identical to SEQ ID NO: 633
  source 1..75: mol_type = other RNA
  modified_base 1: mod_base = OTHER; note = 2'-O-methyl modified nucleotide with phosphorothioate linkage
  modified_base 2: mod_base = OTHER; note = 2'-O-methyl modified nucleotide with phosphorothioate linkage
  modified_base 16: mod_base = OTHER; note = Nucleotide attached to AN1 (C6-U phosphoramidite (5'-Dimethoxytrityl-5-[N-(trifluoroacetylaminohexyl)-3-acry limido]-Uridine, 2'-O-triisopropylsilyloxymethyl-3'-[(2-cyanoethyl)-(N,N-dii sopropyl)]-phosphoramidite))
  modified_base 51: mod_base = OTHER; note = Nucleotide with phosphorothioate linkage
  modified_base 73: mod_base = OTHER; note = Nucleotide with phosphorothioate linkage
  modified_base 74: mod_base = OTHER; note = 2'-O-methyl modified nucleotide

SEQ ID NO: 875 - RNA, 75 nt, synthetic construct; identical to SEQ ID NO: 633
  source 1..75: mol_type = other RNA
  modified_base 1: mod_base = OTHER; note = 2'-O-methyl modified nucleotide with phosphorothioate linkage
  modified_base 2: mod_base = OTHER; note = 2'-O-methyl modified nucleotide with phosphorothioate linkage
  modified_base 13: mod_base = OTHER; note = 2'-fluoro modified nucleotide
  modified_base 14: mod_base = OTHER; note = 2'-fluoro modified nucleotide
  modified_base 16: mod_base = OTHER; note = Nucleotide attached to AN1 (C6-U phosphoramidite (5'-Dimethoxytrityl-5-[N-(trifluoroacetylaminohexyl)-3-acry limido]-Uridine, 2'-O-triisopropylsilyloxymethyl-3'-[(2-cyanoethyl)-(N,N-dii sopropyl)]-phosphoramidite))
  modified_base 53: mod_base = OTHER; note = 2'-fluoro modified nucleotide
  modified_base 58: mod_base = OTHER; note = 2'-O-methyl modified nucleotide
  modified_base 74: mod_base = OTHER; note = Nucleotide with phosphorothioate linkage
  modified_base 75: mod_base = OTHER; note = 2'-O-methyl modified nucleotide

SEQ ID NO: 876 - RNA, 75 nt, synthetic construct; identical to SEQ ID NO: 633
  source 1..75: mol_type = other RNA
  modified_base 1: mod_base = OTHER; note = 2'-O-methyl modified nucleotide with phosphorothioate linkage
  modified_base 2: mod_base = OTHER; note = 2'-O-methyl modified nucleotide
  modified_base 16: mod_base = OTHER; note = Nucleotide attached to AN1 (C6-U phosphoramidite (5'-Dimethoxytrityl-5-[N-(trifluoroacetylaminohexyl)-3-acry limido]-Uridine, 2'-O-triisopropylsilyloxymethyl-3'-[(2-cyanoethyl)-(N,N-dii sopropyl)]-phosphoramidite))
  modified_base 46: mod_base = OTHER; note = 2'-fluoro modified nucleotide
  modified_base 58: mod_base = OTHER; note = 2'-O-methyl modified nucleotide
  modified_base 74: mod_base = OTHER; note = Nucleotide with phosphorothioate linkage
  modified_base 75: mod_base = OTHER; note = 2'-O-methyl modified nucleotide

SEQ ID NO: 877 - RNA, 75 nt, synthetic construct; identical to SEQ ID NO: 633
  source 1..75: mol_type = other RNA
  modified_base 1: mod_base = OTHER; note = 2'-O-methyl modified nucleotide with phosphorothioate linkage
  modified_base 2: mod_base = OTHER; note = 2'-O-methyl modified nucleotide
  modified_base 13: mod_base = OTHER; note = Nucleotide with phosphorothioate linkage
  modified_base 14: mod_base = OTHER; note = 2'-O-methyl modified nucleotide
  modified_base 19: mod_base = OTHER; note = Nucleotide attached to AN1 (C6-U phosphoramidite (5'-Dimethoxytrityl-5-[N-(trifluoroacetylaminohexyl)-3-acry limido]-Uridine, 2'-O-triisopropylsilyloxymethyl-3'-[(2-cyanoethyl)-(N,N-dii sopropyl)]-phosphoramidite))
  modified_base 54: mod_base = OTHER; note = Nucleotide with phosphorothioate linkage
  modified_base 73: mod_base = OTHER; note = Nucleotide with phosphorothioate linkage
  modified_base 74: mod_base = OTHER; note = 2'-O-methyl modified nucleotide

SEQ ID NO: 878 - RNA, 75 nt, synthetic construct; identical to SEQ ID NO: 633
  source 1..75: mol_type = other RNA
  modified_base 1: mod_base = OTHER; note = 2'-O-methyl modified nucleotide with phosphorothioate linkage
  modified_base 2: mod_base = OTHER; note = 2'-O-methyl modified nucleotide with phosphorothioate linkage
  modified_base 12: mod_base = OTHER; note = Nucleotide with phosphorothioate linkage
  modified_base 13: mod_base = OTHER; note = 2'-fluoro modified nucleotide with phosphorothioate linkage
  modified_base 19: mod_base = OTHER; note = Nucleotide attached to AN1 (C6-U phosphoramidite (5'-Dimethoxytrityl-5-[N-(trifluoroacetylaminohexyl)-3-acry limido]-Uridine, 2'-O-triisopropylsilyloxymethyl-3'-[(2-cyanoethyl)-(N,N-dii sopropyl)]-phosphoramidite))
  modified_base 23: mod_base = OTHER; note = Nucleotide with phosphorothioate linkage
  modified_base 24: mod_base = OTHER; note = 2'-fluoro modified nucleotide
  modified_base 43: mod_base = OTHER; note = 2'-fluoro modified nucleotide
  modified_base 51: mod_base = OTHER; note = Nucleotide with phosphorothioate linkage
  modified_base 58: mod_base = OTHER; note = 2'-O-methyl modified nucleotide with phosphorothioate linkage
  modified_base 60: mod_base = OTHER; note = 2'-fluoro modified nucleotide
  modified_base 67: mod_base = OTHER; note = 2'-fluoro modified nucleotide
  modified_base 69: mod_base = OTHER; note = 2'-fluoro modified nucleotide
  modified_base 73: mod_base = OTHER; note = Nucleotide with phosphorothioate linkage
  modified_base 74: mod_base = OTHER; note = 2'-O-methyl modified nucleotide

SEQ ID NO: 879 - RNA, 75 nt, synthetic construct; identical to SEQ ID NO: 633
  source 1..75: mol_type = other RNA
  modified_base 1: mod_base = OTHER; note = 2'-O-methyl modified nucleotide with phosphorothioate linkage
  modified_base 2: mod_base = OTHER; note = 2'-O-methyl modified nucleotide with phosphorothioate linkage
  modified_base 14: mod_base = OTHER; note = 2'-fluoro modified nucleotide
  modified_base 16: mod_base = OTHER; note = 2'-fluoro modified nucleotide
  modified_base 19: mod_base = OTHER; note = Nucleotide attached to AN1 (C6-U phosphoramidite (5'-Dimethoxytrityl-5-[N-(trifluoroacetylaminohexyl)-3-acry limido]-Uridine, 2'-O-triisopropylsilyloxymethyl-3'-[(2-cyanoethyl)-(N,N-dii sopropyl)]-phosphoramidite))
  modified_base 22: mod_base = OTHER; note = 2'-fluoro modified nucleotide
  modified_base 24: mod_base = OTHER; note = 2'-fluoro modified nucleotide
  modified_base 40: mod_base = OTHER; note = Nucleotide with phosphorothioate linkage
  modified_base 43: mod_base = OTHER; note = 2'-fluoro modified nucleotide
  modified_base 44: mod_base = OTHER; note = 2'-fluoro modified nucleotide
  modified_base 45: mod_base = OTHER; note = 2'-fluoro modified nucleotide with phosphorothioate linkage
  modified_base 51: mod_base = OTHER; note = 2'-fluoro modified nucleotide
  modified_base 60: mod_base = OTHER; note = 2'-fluoro modified nucleotide
  modified_base 73: mod_base = OTHER; note = Nucleotide with phosphorothioate linkage

SEQ ID NO: 880 - RNA, 75 nt, synthetic construct; identical to SEQ ID NO: 633
  source 1..75: mol_type = other RNA
  modified_base 1: mod_base = OTHER; note = 2'-O-methyl modified nucleotide
  modified_base 19: mod_base = OTHER; note = Nucleotide attached to AN1 (C6-U phosphoramidite (5'-Dimethoxytrityl-5-[N-(trifluoroacetylaminohexyl)-3-acry limido]-Uridine, 2'-O-triisopropylsilyloxymethyl-3'-[(2-cyanoethyl)-(N,N-dii sopropyl)]-phosphoramidite))
  modified_base 40: mod_base = OTHER; note = 2'-fluoro modified nucleotide
  modified_base 41: mod_base = OTHER; note = 2'-O-methyl modified nucleotide with phosphorothioate linkage
  modified_base 42: mod_base = OTHER; note = 2'-fluoro modified nucleotide
  modified_base 43: mod_base = OTHER; note = 2'-O-methyl modified nucleotide with phosphorothioate linkage
  modified_base 72: mod_base = OTHER; note = 2'-O-methyl modified nucleotide

SEQ ID NO: 881 - RNA, 75 nt, synthetic construct; identical to SEQ ID NO: 633
  source 1..75: mol_type = other RNA
  modified_base 1: mod_base = OTHER; note = 2'-O-methyl modified nucleotide with phosphorothioate linkage
  modified_base 2: mod_base = OTHER; note = 2'-O-methyl modified nucleotide
  modified_base 19: mod_base = OTHER; note = Nucleotide attached to AN1 (C6-U phosphoramidite (5'-Dimethoxytrityl-5-[N-(trifluoroacetylaminohexyl)-3-acry limido]-Uridine, 2'-O-triisopropylsilyloxymethyl-3'-[(2-cyanoethyl)-(N,N-dii sopropyl)]-phosphoramidite))
  modified_base 73: mod_base = OTHER; note = Nucleotide with phosphorothioate linkage
  modified_base 74: mod_base = OTHER; note = 2'-O-methyl modified nucleotide

SEQ ID NO: 882 - RNA, 75 nt, synthetic construct; identical to SEQ ID NO: 633
  source 1..75: mol_type = other RNA
  modified_base 1: mod_base = OTHER; note = 2'-O-methyl modified nucleotide with phosphorothioate linkage
  modified_base 2: mod_base = OTHER; note = 2'-O-methyl modified nucleotide
  modified_base 19: mod_base = OTHER; note = Nucleotide attached to AN1 (C6-U phosphoramidite (5'-Dimethoxytrityl-5-[N-(trifluoroacetylaminohexyl)-3-acry limido]-Uridine, 2'-O-triisopropylsilyloxymethyl-3'-[(2-cyanoethyl)-(N,N-dii sopropyl)]-phosphoramidite))

SEQ ID NO: 883 - RNA, 75 nt, synthetic construct; identical to SEQ ID NO: 633
  source 1..75: mol_type = other RNA
  modified_base 1: mod_base = OTHER; note = 2'-O-methyl modified nucleotide with phosphorothioate linkage
  modified_base 2: mod_base = OTHER; note = 2'-O-methyl modified nucleotide with phosphorothioate linkage
  modified_base 19: mod_base = OTHER; note = Nucleotide attached to AN1 (C6-U phosphoramidite (5'-Dimethoxytrityl-5-[N-(trifluoroacetylaminohexyl)-3-acry limido]-Uridine, 2'-O-triisopropylsilyloxymethyl-3'-[(2-cyanoethyl)-(N,N-dii sopropyl)]-phosphoramidite))
  modified_base 74: mod_base = OTHER; note = Nucleotide with phosphorothioate linkage
  modified_base 75: mod_base = OTHER; note = 2'-O-methyl modified nucleotide

SEQ ID NO: 884 - RNA, 75 nt, synthetic construct; identical to SEQ ID NO: 633
  source 1..75: mol_type = other RNA
  modified_base 1: mod_base = OTHER; note = 2'-O-methyl modified nucleotide with phosphorothioate linkage
  modified_base 2: mod_base = OTHER; note = 2'-O-methyl modified nucleotide with phosphorothioate linkage
  modified_base 19: mod_base = OTHER; note = Nucleotide attached to AN1 (C6-U phosphoramidite (5'-Dimethoxytrityl-5-[N-(trifluoroacetylaminohexyl)-3-acry limido]-Uridine, 2'-O-triisopropylsilyloxymethyl-3'-[(2-cyanoethyl)-(N,N-dii sopropyl)]-phosphoramidite))
  modified_base 51: mod_base = OTHER; note = Nucleotide with phosphorothioate linkage
  modified_base 73: mod_base = OTHER; note = Nucleotide with phosphorothioate linkage
  modified_base 74: mod_base = OTHER; note = 2'-O-methyl modified nucleotide

SEQ ID NO: 885 - RNA, 75 nt, synthetic construct; identical to SEQ ID NO: 633
  source 1..75: mol_type = other RNA
  modified_base 1: mod_base = OTHER; note = 2'-O-methyl modified nucleotide with phosphorothioate linkage
  modified_base 2: mod_base = OTHER; note = 2'-O-methyl modified nucleotide with phosphorothioate linkage
  modified_base 13: mod_base = OTHER; note = 2'-fluoro modified nucleotide
  modified_base 14: mod_base = OTHER; note = 2'-fluoro modified nucleotide
  modified_base 19: mod_base = OTHER; note = Nucleotide attached to AN1 (C6-U phosphoramidite (5'-Dimethoxytrityl-5-[N-(trifluoroacetylaminohexyl)-3-acry limido]-Uridine, 2'-O-triisopropylsilyloxymethyl-3'-[(2-cyanoethyl)-(N,N-dii sopropyl)]-phosphoramidite))
  modified_base 53: mod_base = OTHER; note = 2'-fluoro modified nucleotide
  modified_base 58: mod_base = OTHER; note = 2'-O-methyl modified nucleotide
  modified_base 74: mod_base = OTHER; note = Nucleotide with phosphorothioate linkage
  modified_base 75: mod_base = OTHER; note = 2'-O-methyl modified nucleotide

SEQ ID NO: 886 - RNA, 75 nt, synthetic construct; identical to SEQ ID NO: 633
  source 1..75: mol_type = other RNA
  modified_base 1: mod_base = OTHER; note = 2'-O-methyl modified nucleotide with phosphorothioate linkage
  modified_base 2: mod_base = OTHER; note = 2'-O-methyl modified nucleotide
  modified_base 19: mod_base = OTHER; note = Nucleotide attached to AN1 (C6-U phosphoramidite (5'-Dimethoxytrityl-5-[N-(trifluoroacetylaminohexyl)-3-acry limido]-Uridine, 2'-O-triisopropylsilyloxymethyl-3'-[(2-cyanoethyl)-(N,N-dii sopropyl)]-phosphoramidite))
  modified_base 46: mod_base = OTHER; note = 2'-fluoro modified nucleotide
  modified_base 58: mod_base = OTHER; note = 2'-O-methyl modified nucleotide
  modified_base 74: mod_base = OTHER; note = Nucleotide with phosphorothioate linkage
  modified_base 75: mod_base = OTHER; note = 2'-O-methyl modified nucleotide

SEQ ID NO: 887 - RNA, 75 nt, synthetic construct; identical to SEQ ID NO: 633
  source 1..75: mol_type = other RNA
  modified_base 1: mod_base = OTHER; note = 2'-O-methyl modified nucleotide with phosphorothioate linkage
  modified_base 2: mod_base = OTHER; note = 2'-O-methyl modified nucleotide
  modified_base 13: mod_base = OTHER; note = Nucleotide with phosphorothioate linkage
  modified_base 14: mod_base = OTHER; note = 2'-O-methyl modified nucleotide
  modified_base 47: mod_base = OTHER; note = Nucleotide attached to AN1 (C6-U phosphoramidite (5'-Dimethoxytrityl-5-[N-(trifluoroacetylaminohexyl)-3-acry limido]-Uridine, 2'-O-triisopropylsilyloxymethyl-3'-[(2-cyanoethyl)-(N,N-dii sopropyl)]-phosphoramidite))
  modified_base 54: mod_base = OTHER; note = Nucleotide with phosphorothioate linkage
  modified_base 73: mod_base = OTHER; note = Nucleotide with phosphorothioate linkage
  modified_base 74: mod_base = OTHER; note = 2'-O-methyl modified nucleotide

SEQ ID NO: 888 - RNA, 75 nt, synthetic construct; identical to SEQ ID NO: 633
  source 1..75: mol_type = other RNA
  modified_base 1: mod_base = OTHER; note = 2'-O-methyl modified nucleotide with phosphorothioate linkage
  modified_base 2: mod_base = OTHER; note = 2'-O-methyl modified nucleotide with phosphorothioate linkage
  modified_base 12: mod_base = OTHER; note = Nucleotide with phosphorothioate linkage
  modified_base 13: mod_base = OTHER; note = 2'-fluoro modified nucleotide with phosphorothioate linkage
  modified_base 23: mod_base = OTHER; note = Nucleotide with phosphorothioate linkage
  modified_base 24: mod_base = OTHER; note = 2'-fluoro modified nucleotide
  modified_base 43: mod_base = OTHER; note = 2'-fluoro modified nucleotide
  modified_base 47: mod_base = OTHER; note = Nucleotide attached to AN1 (C6-U phosphoramidite (5'-Dimethoxytrityl-5-[N-(trifluoroacetylaminohexyl)-3-acry limido]-Uridine, 2'-O-triisopropylsilyloxymethyl-3'-[(2-cyanoethyl)-(N,N-dii sopropyl)]-phosphoramidite))
  modified_base 51: mod_base = OTHER; note = Nucleotide with phosphorothioate linkage
  modified_base 58: mod_base = OTHER; note = 2'-O-methyl modified nucleotide with phosphorothioate linkage
  modified_base 60: mod_base = OTHER; note = 2'-fluoro modified nucleotide
  modified_base 67: mod_base = OTHER; note = 2'-fluoro modified nucleotide
  modified_base 69: mod_base = OTHER; note = 2'-fluoro modified nucleotide
  modified_base 73: mod_base = OTHER; note = Nucleotide with phosphorothioate linkage
  modified_base 74: mod_base = OTHER; note = 2'-O-methyl modified nucleotide

SEQ ID NO: 889 - RNA, 75 nt, synthetic construct; identical to SEQ ID NO: 633
  source 1..75: mol_type = other RNA
  modified_base 1: mod_base = OTHER; note = 2'-O-methyl modified nucleotide with phosphorothioate linkage
  modified_base 2: mod_base = OTHER; note = 2'-O-methyl modified nucleotide with phosphorothioate linkage
  modified_base 14: mod_base = OTHER; note = 2'-fluoro modified nucleotide
  modified_base 16: mod_base = OTHER; note = 2'-fluoro modified nucleotide
  modified_base 22: mod_base = OTHER; note = 2'-fluoro modified nucleotide
  modified_base 24: mod_base = OTHER; note = 2'-fluoro modified nucleotide
  modified_base 40: mod_base = OTHER; note = Nucleotide with phosphorothioate linkage
  modified_base 43: mod_base = OTHER; note = 2'-fluoro modified nucleotide
  modified_base 44: mod_base = OTHER; note = 2'-fluoro modified nucleotide
  modified_base 45: mod_base = OTHER; note = 2'-fluoro modified nucleotide with phosphorothioate linkage
  modified_base 47: mod_base = OTHER; note = Nucleotide attached to AN1 (C6-U phosphoramidite (5'-Dimethoxytrityl-5-[N-(trifluoroacetylaminohexyl)-3-acry limido]-Uridine, 2'-O-triisopropylsilyloxymethyl-3'-[(2-cyanoethyl)-(N,N-dii sopropyl)]-phosphoramidite))
  modified_base 51: mod_base = OTHER; note = 2'-fluoro modified nucleotide
  modified_base 60: mod_base = OTHER; note = 2'-fluoro modified nucleotide
  modified_base 73: mod_base = OTHER; note = Nucleotide with phosphorothioate linkage

SEQ ID NO: 890 - RNA, 75 nt, synthetic construct; identical to SEQ ID NO: 633
  source 1..75: mol_type = other RNA
  modified_base 1: mod_base = OTHER; note = 2'-O-methyl modified nucleotide
  modified_base 40: mod_base = OTHER; note = 2'-fluoro modified nucleotide
  modified_base 41: mod_base = OTHER; note = 2'-O-methyl modified nucleotide with phosphorothioate linkage
  modified_base 42: mod_base = OTHER; note = 2'-fluoro modified nucleotide
  modified_base 43: mod_base = OTHER; note = 2'-O-methyl modified nucleotide with phosphorothioate linkage
  modified_base 47: mod_base = OTHER; note = Nucleotide attached to AN1 (C6-U phosphoramidite (5'-Dimethoxytrityl-5-[N-(trifluoroacetylaminohexyl)-3-acry limido]-Uridine, 2'-O-triisopropylsilyloxymethyl-3'-[(2-cyanoethyl)-(N,N-dii sopropyl)]-phosphoramidite))
  modified_base 72: mod_base = OTHER; note = 2'-O-methyl modified nucleotide

SEQ ID NO: 891 - RNA, 75 nt, synthetic construct; identical to SEQ ID NO: 633
  source 1..75: mol_type = other RNA
  modified_base 1: mod_base = OTHER; note = 2'-O-methyl modified nucleotide with phosphorothioate linkage
  modified_base 2: mod_base = OTHER; note = 2'-O-methyl modified nucleotide
  modified_base 47: mod_base = OTHER; note = Nucleotide attached to AN1 (C6-U phosphoramidite (5'-Dimethoxytrityl-5-[N-(trifluoroacetylaminohexyl)-3-acry limido]-Uridine, 2'-O-triisopropylsilyloxymethyl-3'-[(2-cyanoethyl)-(N,N-dii sopropyl)]-phosphoramidite))
  modified_base 73: mod_base = OTHER; note = Nucleotide with phosphorothioate linkage
  modified_base 74: mod_base = OTHER; note = 2'-O-methyl modified nucleotide

SEQ ID NO: 892 - RNA, 75 nt, synthetic construct; identical to SEQ ID NO: 633
  source 1..75: mol_type = other RNA
  modified_base 1: mod_base = OTHER; note = 2'-O-methyl modified nucleotide with phosphorothioate linkage
  modified_base 2: mod_base = OTHER; note = 2'-O-methyl modified nucleotide
  modified_base 47: mod_base = OTHER; note = Nucleotide attached to AN1 (C6-U phosphoramidite (5'-Dimethoxytrityl-5-[N-(trifluoroacetylaminohexyl)-3-acry limido]-Uridine, 2'-O-triisopropylsilyloxymethyl-3'-[(2-cyanoethyl)-(N,N-dii sopropyl)]-phosphoramidite))

SEQ ID NO: 893 - RNA, 75 nt, synthetic construct; identical to SEQ ID NO: 633
  source 1..75: mol_type = other RNA
  modified_base 1: mod_base = OTHER; note = 2'-O-methyl modified nucleotide with phosphorothioate linkage
  modified_base 2: mod_base = OTHER; note = 2'-O-methyl modified nucleotide with phosphorothioate linkage
  modified_base 47: mod_base = OTHER; note = Nucleotide attached to AN1 (C6-U phosphoramidite (5'-Dimethoxytrityl-5-[N-(trifluoroacetylaminohexyl)-3-acry limido]-Uridine, 2'-O-triisopropylsilyloxymethyl-3'-[(2-cyanoethyl)-(N,N-dii sopropyl)]-phosphoramidite))
  modified_base 74: mod_base = OTHER; note = Nucleotide with phosphorothioate linkage
  modified_base 75: mod_base = OTHER; note = 2'-O-methyl modified nucleotide

SEQ ID NO: 894 - RNA, 75 nt, synthetic construct; identical to SEQ ID NO: 633
  source 1..75: mol_type = other RNA
  modified_base 1: mod_base = OTHER; note = 2'-O-methyl modified nucleotide with phosphorothioate linkage
  modified_base 2: mod_base = OTHER; note = 2'-O-methyl modified nucleotide with phosphorothioate linkage
  modified_base 47: mod_base = OTHER; note = Nucleotide attached to AN1 (C6-U phosphoramidite (5'-Dimethoxytrityl-5-[N-(trifluoroacetylaminohexyl)-3-acry limido]-Uridine, 2'-O-triisopropylsilyloxymethyl-3'-[(2-cyanoethyl)-(N,N-dii sopropyl)]-phosphoramidite))
  modified_base 51: mod_base = OTHER; note = Nucleotide with phosphorothioate linkage
  modified_base 73: mod_base = OTHER; note = Nucleotide with phosphorothioate linkage
  modified_base 74: mod_base = OTHER; note = 2'-O-methyl modified nucleotide

SEQ ID NO: 895 - RNA, 75 nt, synthetic construct; identical to SEQ ID NO: 633
  source 1..75: mol_type = other RNA
  modified_base 1: mod_base = OTHER; note = 2'-O-methyl modified nucleotide with phosphorothioate linkage
  modified_base 2: mod_base = OTHER; note = 2'-O-methyl modified nucleotide with phosphorothioate linkage
  modified_base 13: mod_base = OTHER; note = 2'-fluoro modified nucleotide
  modified_base 14: mod_base = OTHER; note = 2'-fluoro modified nucleotide
  modified_base 47: mod_base = OTHER; note = Nucleotide attached to AN1 (C6-U phosphoramidite (5'-Dimethoxytrityl-5-[N-(trifluoroacetylaminohexyl)-3-acry limido]-Uridine, 2'-O-triisopropylsilyloxymethyl-3'-[(2-cyanoethyl)-(N,N-dii sopropyl)]-phosphoramidite))
  modified_base 53: mod_base = OTHER; note = 2'-fluoro modified nucleotide
  modified_base 58: mod_base = OTHER; note = 2'-O-methyl modified nucleotide
  modified_base 74: mod_base = OTHER; note = Nucleotide with phosphorothioate linkage
  modified_base 75: mod_base = OTHER; note = 2'-O-methyl modified nucleotide

SEQ ID NO: 896 - RNA, 75 nt, synthetic construct; identical to SEQ ID NO: 633
  source 1..75: mol_type = other RNA
  modified_base 1: mod_base = OTHER; note = 2'-O-methyl modified nucleotide with phosphorothioate linkage
  modified_base 2: mod_base = OTHER; note = 2'-O-methyl modified nucleotide
  modified_base 46: mod_base = OTHER; note = 2'-fluoro modified nucleotide
  modified_base 47: mod_base = OTHER; note = Nucleotide attached to AN1 (C6-U phosphoramidite (5'-Dimethoxytrityl-5-[N-(trifluoroacetylaminohexyl)-3-acry limido]-Uridine, 2'-O-triisopropylsilyloxymethyl-3'-[(2-cyanoethyl)-(N,N-dii sopropyl)]-phosphoramidite))
  modified_base 58: mod_base = OTHER; note = 2'-O-methyl modified nucleotide
  modified_base 74: mod_base = OTHER; note = Nucleotide with phosphorothioate linkage
  modified_base 75: mod_base = OTHER; note = 2'-O-methyl modified nucleotide

SEQ ID NO: 897 - RNA, 75 nt, synthetic construct
  source 1..75: mol_type = other RNA
  modified_base 1: mod_base = OTHER; note = 2'-O-methyl modified nucleotide with phosphorothioate linkage
  modified_base 2: mod_base = OTHER; note = 2'-O-methyl modified nucleotide with phosphorothioate linkage
  modified_base 14: mod_base = OTHER; note = 2'-fluoro modified nucleotide
  modified_base 16: mod_base = OTHER; note = 2'-fluoro modified nucleotide
  modified_base 22: mod_base = OTHER; note = 2'-fluoro modified nucleotide
  modified_base 24: mod_base = OTHER; note = 2'-fluoro modified nucleotide
  modified_base 40: mod_base = OTHER; note = Nucleotide with phosphorothioate linkage
  modified_base 43: mod_base = OTHER; note = 2'-fluoro modified nucleotide
  modified_base 44: mod_base = OTHER; note = 2'-fluoro modified nucleotide
  modified_base 45: mod_base = OTHER; note = 2'-fluoro modified nucleotide with phosphorothioate linkage
  modified_base 51: mod_base = OTHER; note = 2'-fluoro modified nucleotide
  modified_base 60: mod_base = OTHER; note = 2'-fluoro modified nucleotide
  modified_base 73: mod_base = OTHER; note = Nucleotide with phosphorothioate linkage
ggttccatggtgtaatggtaagcactctggactctaaatccagcgatccgagttcgagtctcggtggaacctcca

SEQ ID NO: 898 - RNA, 75 nt, synthetic construct; identical to SEQ ID NO: 897
  source 1..75: mol_type = other RNA
  modified_base 1: mod_base = OTHER; note = 2'-O-methyl modified nucleotide with phosphorothioate linkage
  modified_base 2: mod_base = OTHER; note = 2'-O-methyl modified nucleotide with phosphorothioate linkage
  modified_base 12: mod_base = OTHER; note = Nucleotide with phosphorothioate linkage
  modified_base 13: mod_base = OTHER; note = 2'-fluoro modified nucleotide with phosphorothioate linkage
  modified_base 23: mod_base = OTHER; note = Nucleotide with phosphorothioate linkage
  modified_base 24: mod_base = OTHER; note = 2'-fluoro modified nucleotide
  modified_base 43: mod_base = OTHER; note = 2'-fluoro modified nucleotide
  modified_base 51: mod_base = OTHER; note = Nucleotide with phosphorothioate linkage
  modified_base 58: mod_base = OTHER; note = 2'-O-methyl modified nucleotide with phosphorothioate linkage
  modified_base 60: mod_base = OTHER; note = 2'-fluoro modified nucleotide
  modified_base 67: mod_base = OTHER; note = 2'-fluoro modified nucleotide
  modified_base 69: mod_base = OTHER; note = 2'-fluoro modified nucleotide
  modified_base 73: mod_base = OTHER; note = Nucleotide with phosphorothioate linkage
  modified_base 74: mod_base = OTHER; note = 2'-O-methyl modified nucleotide

SEQ ID NO: 899 - RNA, 75 nt, synthetic construct; identical to SEQ ID NO: 897
  source 1..75: mol_type = other RNA
  modified_base 1: mod_base = OTHER; note = 2'-O-methyl modified nucleotide with phosphorothioate linkage
  modified_base 2: mod_base = OTHER; note = 2'-fluoro modified nucleotide
  modified_base 19: mod_base = OTHER; note = Nucleotide with phosphorothioate linkage
  modified_base 20: mod_base = OTHER; note = 2'-fluoro modified nucleotide
  modified_base 23: mod_base = OTHER; note = Nucleotide with phosphorothioate linkage
  modified_base 24: mod_base = OTHER; note = 2'-fluoro modified nucleotide
  modified_base 28: mod_base = OTHER; note = 2'-fluoro modified nucleotide
  modified_base 38: mod_base = OTHER; note = Nucleotide with phosphorothioate linkage
  modified_base 39: mod_base = OTHER; note = 2'-fluoro modified nucleotide
  modified_base 51: mod_base = OTHER; note = Nucleotide with phosphorothioate linkage
  modified_base 60: mod_base = OTHER; note = 2'-fluoro modified nucleotide
  modified_base 65: mod_base = OTHER; note = Nucleotide with phosphorothioate linkage
  modified_base 73: mod_base = OTHER; note = Nucleotide with phosphorothioate linkage
  modified_base 74: mod_base = OTHER; note = 2'-O-methyl modified nucleotide

SEQ ID NO: 900 - RNA, 75 nt, synthetic construct; identical to SEQ ID NO: 897
  source 1..75: mol_type = other RNA
  modified_base 1: mod_base = OTHER; note = 2'-O-methyl modified nucleotide with phosphorothioate linkage
  modified_base 2: mod_base = OTHER; note = 2'-O-methyl modified nucleotide
  modified_base 13: mod_base = OTHER; note = Nucleotide with phosphorothioate linkage
  modified_base 14: mod_base = OTHER; note = 2'-fluoro modified nucleotide
  modified_base 22: mod_base = OTHER; note = 2'-fluoro modified nucleotide
  modified_base 23: mod_base = OTHER; note = 2'-fluoro modified nucleotide
  modified_base 27: mod_base = OTHER; note = 2'-fluoro modified nucleotide with phosphorothioate linkage
  modified_base 40: mod_base = OTHER; note = 2'-O-methyl modified nucleotide with phosphorothioate linkage
  modified_base 41: mod_base = OTHER; note = 2'-fluoro modified nucleotide
  modified_base 44: mod_base = OTHER; note = 2'-fluoro modified nucleotide
  modified_base 55: mod_base = OTHER; note = Nucleotide with phosphorothioate linkage
  modified_base 73: mod_base = OTHER; note = Nucleotide with phosphorothioate linkage
  modified_base 74: mod_base = OTHER; note = Nucleotide with phosphorothioate linkage

SEQ ID NO: 901 - RNA, 75 nt, synthetic construct; identical to SEQ ID NO: 897
  source 1..75: mol_type = other RNA
  modified_base 1: mod_base = OTHER; note = 2'-O-methyl modified nucleotide with phosphorothioate linkage
  modified_base 2: mod_base = OTHER; note = 2'-O-methyl modified nucleotide
  modified_base 12: mod_base = OTHER; note = 2'-O-methyl modified nucleotide
  modified_base 13: mod_base = OTHER; note = Nucleotide with phosphorothioate linkage
  modified_base 22: mod_base = OTHER; note = 2'-fluoro modified nucleotide
  modified_base 23: mod_base = OTHER; note = 2'-fluoro modified nucleotide
  modified_base 27: mod_base = OTHER; note = Nucleotide with phosphorothioate linkage
  modified_base 28: mod_base = OTHER; note = 2'-fluoro modified nucleotide
  modified_base 40: mod_base = OTHER; note = Nucleotide with phosphorothioate linkage
  modified_base 41: mod_base = OTHER; note = 2'-fluoro modified nucleotide
  modified_base 46: mod_base = OTHER; note = 2'-fluoro modified nucleotide
  modified_base 55: mod_base = OTHER; note = 2'-O-methyl modified nucleotide
  modified_base 63: mod_base = OTHER; note = Nucleotide with phosphorothioate linkage
  modified_base 64: mod_base = OTHER; note = Nucleotide with phosphorothioate linkage
  modified_base 67: mod_base = OTHER; note = 2'-fluoro modified nucleotide
  modified_base 73: mod_base = OTHER; note = Nucleotide with phosphorothioate linkage
  modified_base 74: mod_base = OTHER; note = 2'-O-methyl modified nucleotide

SEQ ID NO: 902 - RNA, 75 nt, synthetic construct; identical to SEQ ID NO: 897
  source 1..75: mol_type = other RNA
  modified_base 1: mod_base = OTHER; note = 2'-O-methyl modified nucleotide with phosphorothioate linkage
  modified_base 2: mod_base = OTHER; note = 2'-fluoro modified nucleotide with phosphorothioate linkage
  modified_base 18: mod_base = OTHER; note = 2'-fluoro modified nucleotide
  modified_base 19: mod_base = OTHER; note = 2'-fluoro modified nucleotide
  modified_base 20: mod_base = OTHER; note = 2'-fluoro modified nucleotide
  modified_base 23: mod_base = OTHER; note = Nucleotide with phosphorothioate linkage
  modified_base 24: mod_base = OTHER; note = 2'-fluoro modified nucleotide with phosphorothioate linkage
  modified_base 25: mod_base = OTHER; note = Nucleotide with phosphorothioate linkage
  modified_base 27: mod_base = OTHER; note = 2'-fluoro modified nucleotide
  modified_base 31: mod_base = OTHER; note = 2'-fluoro modified nucleotide
  modified_base 34: mod_base = OTHER; note = 2'-fluoro modified nucleotide
  modified_base 44: mod_base = OTHER; note = 2'-fluoro modified nucleotide
  modified_base 48: mod_base = OTHER; note = 2'-fluoro modified nucleotide with phosphorothioate linkage
  modified_base 63: mod_base = OTHER; note = 2'-fluoro modified nucleotide with phosphorothioate linkage
  modified_base 67: mod_base = OTHER; note = 2'-fluoro modified nucleotide
  modified_base 71: mod_base = OTHER; note = 2'-fluoro modified nucleotide
  modified_base 75: mod_base = OTHER; note = 2'-O-methyl modified nucleotide

SEQ ID NO: 903 - RNA, 75 nt, synthetic construct; identical to SEQ ID NO: 897
  source 1..75: mol_type = other RNA
  modified_base 1: mod_base = OTHER; note = 2'-O-methyl modified nucleotide with phosphorothioate linkage
  modified_base 13: mod_base = OTHER; note = 2'-fluoro modified nucleotide with phosphorothioate linkage
  modified_base 19: mod_base = OTHER; note = Nucleotide with phosphorothioate linkage
  modified_base 20: mod_base = OTHER; note = 2'-fluoro modified nucleotide
  modified_base 28: mod_base = OTHER; note = 2'-fluoro modified nucleotide
  modified_base 40: mod_base = OTHER; note = 2'-fluoro modified nucleotide
  modified_base 42: mod_base = OTHER; note = 2'-fluoro modified nucleotide
  modified_base 52: mod_base = OTHER; note = 2'-fluoro modified nucleotide with phosphorothioate linkage
  modified_base 67: mod_base = OTHER; note = 2'-fluoro modified nucleotide
  modified_base 74: mod_base = OTHER; note = Nucleotide with phosphorothioate linkage
  modified_base 75: mod_base = OTHER; note = 2'-fluoro modified nucleotide

SEQ ID NO: 904 - RNA, 75 nt, synthetic construct; identical to SEQ ID NO: 897
  source 1..75: mol_type = other RNA
  modified_base 1: mod_base = OTHER; note = 2'-O-methyl modified nucleotide with phosphorothioate linkage
  modified_base 4: mod_base = OTHER; note = 2'-fluoro modified nucleotide with phosphorothioate linkage
  modified_base 28: mod_base = OTHER; note = 2'-O-methyl modified nucleotide
  modified_base 43: mod_base = OTHER; note = 2'-fluoro modified nucleotide
  modified_base 46: mod_base = OTHER; note = 2'-fluoro modified nucleotide
  modified_base 55: mod_base = OTHER; note = 2'-fluoro modified nucleotide
  modified_base 60: mod_base = OTHER; note = 2'-fluoro modified nucleotide
  modified_base 61: mod_base = OTHER; note = 2'-fluoro modified nucleotide
  modified_base 73: mod_base = OTHER; note = 2'-fluoro modified nucleotide with phosphorothioate linkage

SEQ ID NO: 905 - RNA, 75 nt, synthetic construct; identical to SEQ ID NO: 897
  source 1..75: mol_type = other RNA
  modified_base 1: mod_base = OTHER; note = 2'-fluoro modified nucleotide with phosphorothioate linkage
  modified_base 2: mod_base = OTHER; note = 2'-O-methyl modified nucleotide with phosphorothioate linkage
  modified_base 12: mod_base = OTHER; note = 2'-O-methyl modified nucleotide
  modified_base 13: mod_base = OTHER; note = Nucleotide with phosphorothioate linkage
  modified_base 16: mod_base = OTHER; note = 2'-fluoro modified nucleotide
  modified_base 22: mod_base = OTHER; note = 2'-fluoro modified nucleotide
  modified_base 23: mod_base = OTHER; note = 2'-fluoro modified nucleotide
  modified_base 28: mod_base = OTHER; note = 2'-fluoro modified nucleotide
  modified_base 29: mod_base = OTHER; note = 2'-O-methyl modified nucleotide
  modified_base 44: mod_base = OTHER; note = 2'-fluoro modified nucleotide
  modified_base 53: mod_base = OTHER; note = 2'-fluoro modified nucleotide with phosphorothioate linkage
  modified_base 65: mod_base = OTHER; note = Nucleotide with phosphorothioate linkage
  modified_base 66: mod_base = OTHER; note = Nucleotide with phosphorothioate linkage
  modified_base 67: mod_base = OTHER; note = 2'-fluoro modified nucleotide
  modified_base 73: mod_base = OTHER; note = Nucleotide with phosphorothioate linkage
  modified_base 74: mod_base = OTHER; note = 2'-O-methyl modified nucleotide
  modified_base 75: mod_base = OTHER; note = 2'-fluoro modified nucleotide

SEQ ID NO: 906 - RNA, 75 nt, synthetic construct; identical to SEQ ID NO: 897
  source 1..75: mol_type = other RNA
  modified_base 1: mod_base = OTHER; note = 2'-O-methyl modified nucleotide with phosphorothioate linkage
  modified_base 2: mod_base = OTHER; note = 2'-O-methyl modified nucleotide with phosphorothioate linkage
  modified_base 12: mod_base = OTHER; note = Nucleotide with phosphorothioate linkage
  modified_base 19: mod_base = OTHER; note = 2'-fluoro modified nucleotide
  modified_base 22: mod_base = OTHER; note = 2'-fluoro modified nucleotide
  modified_base 23: mod_base = OTHER; note = 2'-fluoro modified nucleotide
  modified_base 31: mod_base = OTHER; note = 2'-O-methyl modified nucleotide
  modified_base 50: mod_base = OTHER; note = Nucleotide with phosphorothioate linkage
  modified_base 51: mod_base = OTHER; note = 2'-fluoro modified nucleotide
  modified_base 63: mod_base = OTHER; note = Nucleotide with phosphorothioate linkage
  modified_base 66: mod_base = OTHER; note = 2'-fluoro modified nucleotide
  modified_base 73: mod_base = OTHER; note = Nucleotide with phosphorothioate linkage
  modified_base 74: mod_base = OTHER; note = 2'-O-methyl modified nucleotide

SEQ ID NO: 907 - RNA, 75 nt, synthetic construct; identical to SEQ ID NO: 897
  source 1..75: mol_type = other RNA
  modified_base 1: mod_base = OTHER; note = 2'-O-methyl modified nucleotide with phosphorothioate linkage attached to N-acetylgalactosamine-triethylamine
  modified_base 2: mod_base = OTHER; note = 2'-O-methyl modified nucleotide with phosphorothioate linkage
  modified_base 14: mod_base = OTHER; note = 2'-fluoro modified nucleotide
  modified_base 16: mod_base = OTHER; note = 2'-fluoro modified nucleotide
  modified_base 22: mod_base = OTHER; note = 2'-fluoro modified nucleotide
  modified_base 24: mod_base = OTHER; note = 2'-fluoro modified nucleotide
  modified_base 40: mod_base = OTHER; note = Nucleotide with phosphorothioate linkage
  modified_base 43: mod_base = OTHER; note = 2'-fluoro modified nucleotide
  modified_base 44: mod_base = OTHER; note = 2'-fluoro modified nucleotide
  modified_base 45: mod_base = OTHER; note = 2'-fluoro modified nucleotide with phosphorothioate linkage
  modified_base 51: mod_base = OTHER; note = 2'-fluoro modified nucleotide
  modified_base 60: mod_base = OTHER; note = 2'-fluoro modified nucleotide
  modified_base 73: mod_base = OTHER; note = Nucleotide with phosphorothioate linkage

SEQ ID NO: 908 - RNA, 75 nt, synthetic construct; identical to SEQ ID NO: 897
  source 1..75: mol_type = other RNA
  modified_base 1: mod_base = OTHER; note = 2'-O-methyl modified nucleotide with phosphorothioate linkage attached to N-acetylgalactosamine-triethylamine
  modified_base 2: mod_base = OTHER; note = 2'-O-methyl modified nucleotide with phosphorothioate linkage
  modified_base 12: mod_base = OTHER; note = Nucleotide with phosphorothioate linkage
  modified_base 13: mod_base = OTHER; note = 2'-fluoro modified nucleotide with phosphorothioate linkage
  modified_base 23: mod_base = OTHER; note = Nucleotide with phosphorothioate linkage
  modified_base 24: mod_base = OTHER; note = 2'-fluoro modified nucleotide
  modified_base 43: mod_base = OTHER; note = 2'-fluoro modified nucleotide
  modified_base 51: mod_base = OTHER; note = Nucleotide with phosphorothioate linkage
  modified_base 58: mod_base = OTHER; note = 2'-O-methyl modified nucleotide with phosphorothioate linkage
  modified_base 60: mod_base = OTHER; note = 2'-fluoro modified nucleotide
  modified_base 67: mod_base = OTHER; note = 2'-fluoro modified nucleotide
  modified_base 69: mod_base = OTHER; note = 2'-fluoro modified nucleotide
  modified_base 73: mod_base = OTHER; note = Nucleotide with phosphorothioate linkage
  modified_base 74: mod_base = OTHER; note = 2'-O-methyl modified nucleotide

SEQ ID NO: 909 - RNA, 75 nt, synthetic construct; identical to SEQ ID NO: 897
  source 1..75: mol_type = other RNA
  modified_base 1: mod_base = OTHER; note = 2'-O-methyl modified nucleotide with phosphorothioate linkage attached to N-acetylgalactosamine-triethylamine
  modified_base 2: mod_base = OTHER; note = 2'-fluoro modified nucleotide
  modified_base 19: mod_base = OTHER; note = Nucleotide with phosphorothioate linkage
  modified_base 20: mod_base = OTHER; note = 2'-fluoro modified nucleotide
  modified_base 23: mod_base = OTHER; note = Nucleotide with phosphorothioate linkage
  modified_base 24: mod_base = OTHER; note = 2'-fluoro modified nucleotide
  modified_base 28: mod_base = OTHER; note = 2'-fluoro modified nucleotide
  modified_base 38: mod_base = OTHER; note = Nucleotide with phosphorothioate linkage
  modified_base 39: mod_base = OTHER; note = 2'-fluoro modified nucleotide
  modified_base 51: mod_base = OTHER; note = Nucleotide with phosphorothioate linkage
  modified_base 60: mod_base = OTHER; note = 2'-fluoro modified nucleotide
  modified_base 65: mod_base = OTHER; note = Nucleotide with phosphorothioate linkage
  modified_base 73: mod_base = OTHER; note = Nucleotide with phosphorothioate linkage
  modified_base 74: mod_base = OTHER; note = 2'-O-methyl modified nucleotide

SEQ ID NO: 910 - RNA, 75 nt, synthetic construct; identical to SEQ ID NO: 897
  source 1..75: mol_type = other RNA
  modified_base 1: mod_base = OTHER; note = 2'-O-methyl modified nucleotide with phosphorothioate linkage attached to N-acetylgalactosamine-triethylamine
  modified_base 2: mod_base = OTHER; note = 2'-O-methyl modified nucleotide
  modified_base 13: mod_base = OTHER; note = Nucleotide with phosphorothioate linkage
  modified_base 14: mod_base = OTHER; note = 2'-fluoro modified nucleotide
  modified_base 22: mod_base = OTHER; note = 2'-fluoro modified nucleotide
  modified_base 23: mod_base = OTHER; note = 2'-fluoro modified nucleotide
  modified_base 27: mod_base = OTHER; note = 2'-fluoro modified nucleotide with phosphorothioate linkage
  modified_base 40: mod_base = OTHER; note = 2'-O-methyl modified nucleotide with phosphorothioate linkage
  modified_base 41: mod_base = OTHER; note = 2'-fluoro modified nucleotide
  modified_base 44: mod_base = OTHER; note = 2'-fluoro modified nucleotide
  modified_base 55: mod_base = OTHER; note = Nucleotide with phosphorothioate linkage
  modified_base 73: mod_base = OTHER; note = Nucleotide with phosphorothioate linkage
  modified_base 74: mod_base = OTHER; note = Nucleotide with phosphorothioate linkage

SEQ ID NO: 911 - RNA, 75 nt, synthetic construct; identical to SEQ ID NO: 897
  source 1..75: mol_type = other RNA
  modified_base 1: mod_base = OTHER; note = 2'-O-methyl modified nucleotide with phosphorothioate linkage attached to N-acetylgalactosamine-triethylamine
  modified_base 2: mod_base = OTHER; note = 2'-O-methyl modified nucleotide
  modified_base 12: mod_base = OTHER; note = 2'-O-methyl modified nucleotide
  modified_base 13: mod_base = OTHER; note = Nucleotide with phosphorothioate linkage
  modified_base 22: mod_base = OTHER; note = 2'-fluoro modified nucleotide
  modified_base 23: mod_base = OTHER; note = 2'-fluoro modified nucleotide
  modified_base 27: mod_base = OTHER; note = Nucleotide with phosphorothioate linkage
  modified_base 28: mod_base = OTHER; note = 2'-fluoro modified nucleotide
  modified_base 40: mod_base = OTHER; note = Nucleotide with phosphorothioate linkage
  modified_base 41: mod_base = OTHER; note = 2'-fluoro modified nucleotide
  modified_base 46: mod_base = OTHER; note = 2'-fluoro modified nucleotide
  modified_base 55: mod_base = OTHER; note = 2'-O-methyl modified nucleotide
  modified_base 63: mod_base = OTHER; note = Nucleotide with phosphorothioate linkage
  modified_base 64: mod_base = OTHER; note = Nucleotide with phosphorothioate linkage
  modified_base 67: mod_base = OTHER; note = 2'-fluoro modified nucleotide
  modified_base 73: mod_base = OTHER; note = Nucleotide with phosphorothioate linkage
  modified_base 74: mod_base = OTHER; note = 2'-O-methyl modified nucleotide

SEQ ID NO: 912 - RNA, 75 nt, synthetic construct; identical to SEQ ID NO: 897
  source 1..75: mol_type = other RNA
  modified_base 1: mod_base = OTHER; note = 2'-O-methyl modified nucleotide with phosphorothioate linkage attached to N-acetylgalactosamine-triethylamine
  modified_base 2: mod_base = OTHER; note = 2'-fluoro modified nucleotide with phosphorothioate linkage
  modified_base 18: mod_base = OTHER; note = 2'-fluoro modified nucleotide
  modified_base 19: mod_base = OTHER; note = 2'-fluoro modified nucleotide
  modified_base 20: mod_base = OTHER; note = 2'-fluoro modified nucleotide
  modified_base 23: mod_base = OTHER; note = Nucleotide with phosphorothioate linkage
  modified_base 24: mod_base = OTHER; note = 2'-fluoro modified nucleotide with phosphorothioate linkage
  modified_base 25: mod_base = OTHER; note = Nucleotide with phosphorothioate linkage
  modified_base 27: mod_base = OTHER; note = 2'-fluoro modified nucleotide
  modified_base 31: mod_base = OTHER; note = 2'-fluoro modified nucleotide
  modified_base 34: mod_base = OTHER; note = 2'-fluoro modified nucleotide
  modified_base 44: mod_base = OTHER; note = 2'-fluoro modified nucleotide
  modified_base 48: mod_base = OTHER; note = 2'-fluoro modified nucleotide with phosphorothioate linkage
  modified_base 63: mod_base = OTHER; note = 2'-fluoro modified nucleotide with phosphorothioate linkage
  modified_base 67: mod_base = OTHER; note = 2'-fluoro modified nucleotide
  modified_base 71: mod_base = OTHER; note = 2'-fluoro modified nucleotide
  modified_base 75: mod_base = OTHER; note = 2'-O-methyl modified nucleotide

SEQ ID NO: 913 - RNA, 75 nt, synthetic construct; identical to SEQ ID NO: 897
  source 1..75: mol_type = other RNA
  modified_base 1: mod_base = OTHER; note = 2'-O-methyl modified nucleotide with phosphorothioate linkage attached to N-acetylgalactosamine-triethylamine
  modified_base 13: mod_base = OTHER; note = 2'-fluoro modified nucleotide with phosphorothioate linkage
  modified_base 19: mod_base = OTHER; note = Nucleotide with phosphorothioate linkage
  modified_base 20: mod_base = OTHER; note = 2'-fluoro modified nucleotide
  modified_base 28: mod_base = OTHER; note = 2'-fluoro modified nucleotide
  modified_base 40: mod_base = OTHER; note = 2'-fluoro modified nucleotide
  modified_base 42: mod_base = OTHER; note = 2'-fluoro modified nucleotide
  modified_base 52: mod_base = OTHER; note = 2'-fluoro modified nucleotide with phosphorothioate linkage
  modified_base 67: mod_base = OTHER; note = 2'-fluoro modified nucleotide
  modified_base 74: mod_base = OTHER; note = Nucleotide with phosphorothioate linkage
  modified_base 75: mod_base = OTHER; note = 2'-fluoro modified nucleotide

SEQ ID NO: 914 - RNA, 75 nt, synthetic construct; identical to SEQ ID NO: 897
  source 1..75: mol_type = other RNA
  modified_base 1: mod_base = OTHER; note = 2'-O-methyl modified nucleotide with phosphorothioate linkage attached to N-acetylgalactosamine-triethylamine
  modified_base 4: mod_base = OTHER; note = 2'-fluoro modified nucleotide with phosphorothioate linkage
  modified_base 28: mod_base = OTHER; note = 2'-O-methyl modified nucleotide
  modified_base 43: mod_base = OTHER; note = 2'-fluoro modified nucleotide
  modified_base 46: mod_base = OTHER; note = 2'-fluoro modified nucleotide
  modified_base 55: mod_base = OTHER; note = 2'-fluoro modified nucleotide
  modified_base 60: mod_base = OTHER; note = 2'-fluoro modified nucleotide
  modified_base 61: mod_base = OTHER; note = 2'-fluoro modified nucleotide
  modified_base 73: mod_base = OTHER; note = 2'-fluoro modified nucleotide with phosphorothioate linkage

SEQ ID NO: 915 - RNA, 75 nt, synthetic construct; identical to SEQ ID NO: 897
  source 1..75: mol_type = other RNA
  modified_base 1: mod_base = OTHER; note = 2'-fluoro modified nucleotide with phosphorothioate linkage attached to N-acetylgalactosamine-triethylamine
  modified_base 2: mod_base = OTHER; note = 2'-O-methyl modified nucleotide with phosphorothioate linkage
  modified_base 12: mod_base = OTHER; note = 2'-O-methyl modified nucleotide
  modified_base 13: mod_base = OTHER; note = Nucleotide with phosphorothioate linkage
  modified_base 16: mod_base = OTHER; note = 2'-fluoro modified nucleotide
  modified_base 22: mod_base = OTHER; note = 2'-fluoro modified nucleotide
  modified_base 23: mod_base = OTHER; note = 2'-fluoro modified nucleotide
  modified_base 28: mod_base = OTHER; note = 2'-fluoro modified nucleotide
  modified_base 29: mod_base = OTHER; note = 2'-O-methyl modified nucleotide
  modified_base 44: mod_base = OTHER; note = 2'-fluoro modified nucleotide
  modified_base 53: mod_base = OTHER; note = 2'-fluoro modified nucleotide with phosphorothioate linkage
  modified_base 65: mod_base = OTHER; note = Nucleotide with phosphorothioate linkage
  modified_base 66: mod_base = OTHER; note = Nucleotide with phosphorothioate linkage
  modified_base 67: mod_base = OTHER; note = 2'-fluoro modified nucleotide
  modified_base 73: mod_base = OTHER; note = Nucleotide with phosphorothioate linkage
  modified_base 74: mod_base = OTHER; note = 2'-O-methyl modified nucleotide
  modified_base 75: mod_base = OTHER; note = 2'-fluoro modified nucleotide

SEQ ID NO: 916 - RNA, 75 nt, synthetic construct; identical to SEQ ID NO: 897
  source 1..75: mol_type = other RNA
  modified_base 1: mod_base = OTHER; note = 2'-O-methyl modified nucleotide with phosphorothioate linkage attached to N-acetylgalactosamine-triethylamine
  modified_base 2: mod_base = OTHER; note = 2'-O-methyl modified nucleotide with phosphorothioate linkage
  modified_base 12: mod_base = OTHER; note = Nucleotide with phosphorothioate linkage
  modified_base 19: mod_base = OTHER; note = 2'-fluoro modified nucleotide
  modified_base 22: mod_base = OTHER; note = 2'-fluoro modified nucleotide
  modified_base 23: mod_base = OTHER; note = 2'-fluoro modified nucleotide
  modified_base 31: mod_base = OTHER; note = 2'-O-methyl modified nucleotide
  modified_base 50: mod_base = OTHER; note = Nucleotide with phosphorothioate linkage
  modified_base 51: mod_base = OTHER; note = 2'-fluoro modified nucleotide
  modified_base 63: mod_base = OTHER; note = Nucleotide with phosphorothioate linkage
  modified_base 66: mod_base = OTHER; note = 2'-fluoro modified nucleotide
  modified_base 73: mod_base = OTHER; note = Nucleotide with phosphorothioate linkage
  modified_base 74: mod_base = OTHER; note = 2'-O-methyl modified nucleotide

SEQ ID NO: 917 - RNA, 75 nt, synthetic construct; identical to SEQ ID NO: 897
  source 1..75: mol_type = other RNA
  modified_base 1: mod_base = OTHER; note = 2'-O-methyl modified nucleotide with phosphorothioate linkage
  modified_base 2: mod_base = OTHER; note = 2'-O-methyl modified nucleotide with phosphorothioate linkage
  modified_base 14: mod_base = OTHER; note = 2'-fluoro modified nucleotide
  modified_base 16: mod_base = OTHER; note = 2'-fluoro modified nucleotide attached to N-acetylgalactosamine
  modified_base 22: mod_base = OTHER; note = 2'-fluoro modified nucleotide
  modified_base 24: mod_base = OTHER; note = 2'-fluoro modified nucleotide
  modified_base 40: mod_base = OTHER; note = Nucleotide with phosphorothioate linkage
  modified_base 43: mod_base = OTHER; note = 2'-fluoro modified nucleotide
  modified_base 44: mod_base = OTHER; note = 2'-fluoro modified nucleotide
  modified_base 45: mod_base = OTHER; note = 2'-fluoro modified nucleotide with phosphorothioate linkage
  modified_base 51: mod_base = OTHER; note = 2'-fluoro modified nucleotide
  modified_base 60: mod_base = OTHER; note = 2'-fluoro modified nucleotide
  modified_base 73: mod_base = OTHER; note = Nucleotide with phosphorothioate linkage

SEQ ID NO: 918 - RNA, 75 nt, synthetic construct; identical to SEQ ID NO: 897
  source 1..75: mol_type = other RNA
  modified_base 1: mod_base = OTHER; note = 2'-O-methyl modified nucleotide with phosphorothioate linkage
  modified_base 2: mod_base = OTHER; note = 2'-O-methyl modified nucleotide with phosphorothioate linkage
  modified_base 12: mod_base = OTHER; note = Nucleotide with phosphorothioate linkage
  modified_base 13: mod_base = OTHER; note = 2'-fluoro modified nucleotide with phosphorothioate linkage
  modified_base 16: mod_base = OTHER; note = Nucleotide attached to N-acetylgalactosamine
  modified_base 23: mod_base = OTHER; note = Nucleotide with phosphorothioate linkage
  modified_base 24: mod_base = OTHER; note = 2'-fluoro modified nucleotide
  modified_base 43: mod_base = OTHER; note = 2'-fluoro modified nucleotide
  modified_base 51: mod_base = OTHER; note = Nucleotide with phosphorothioate linkage
  modified_base 58: mod_base = OTHER; note = 2'-O-methyl modified nucleotide with phosphorothioate linkage
  modified_base 60: mod_base = OTHER; note = 2'-fluoro modified nucleotide
  modified_base 67: mod_base = OTHER; note = 2'-fluoro modified nucleotide
  modified_base 69: mod_base = OTHER; note = 2'-fluoro modified nucleotide
  modified_base 73: mod_base = OTHER; note = Nucleotide with phosphorothioate linkage
  modified_base 74: mod_base = OTHER; note = 2'-O-methyl modified nucleotide

SEQ ID NO: 919 - RNA, 75 nt, synthetic construct; identical to SEQ ID NO: 897
  source 1..75: mol_type = other RNA
  modified_base 1: mod_base = OTHER; note = 2'-O-methyl modified nucleotide with phosphorothioate linkage
  modified_base 2: mod_base = OTHER; note = 2'-fluoro modified nucleotide
  modified_base 16: mod_base = OTHER; note = Nucleotide attached to N-acetylgalactosamine
  modified_base 19: mod_base = OTHER; note = Nucleotide with phosphorothioate linkage
  modified_base 20: mod_base = OTHER; note = 2'-fluoro modified nucleotide
  modified_base 23: mod_base = OTHER; note = Nucleotide with phosphorothioate linkage
  modified_base 24: mod_base = OTHER; note = 2'-fluoro modified nucleotide
  modified_base 28: mod_base = OTHER; note = 2'-fluoro modified nucleotide
  modified_base 38: mod_base = OTHER; note = Nucleotide with phosphorothioate linkage
  modified_base 39: mod_base = OTHER; note = 2'-fluoro modified nucleotide
  modified_base 51: mod_base = OTHER; note = Nucleotide with phosphorothioate linkage
  modified_base 60: mod_base = OTHER; note = 2'-fluoro modified nucleotide
  modified_base 65: mod_base = OTHER; note = Nucleotide with phosphorothioate linkage
  modified_base 73: mod_base = OTHER; note = Nucleotide with phosphorothioate linkage
  modified_base 74: mod_base = OTHER; note = 2'-O-methyl modified nucleotide

SEQ ID NO: 920 - RNA, 75 nt, synthetic construct; identical to SEQ ID NO: 897
  source 1..75: mol_type = other RNA
  modified_base 1: mod_base = OTHER; note = 2'-O-methyl modified nucleotide with phosphorothioate linkage
  modified_base 2: mod_base = OTHER; note = 2'-O-methyl modified nucleotide
  modified_base 13: mod_base = OTHER; note = Nucleotide with phosphorothioate linkage
  modified_base 14: mod_base = OTHER; note = 2'-fluoro modified nucleotide
  modified_base 16: mod_base = OTHER; note = Nucleotide attached to N-acetylgalactosamine
  modified_base 22: mod_base = OTHER; note = 2'-fluoro modified nucleotide
  modified_base 23: mod_base = OTHER; note = 2'-fluoro modified nucleotide
  modified_base 27: mod_base = OTHER; note = 2'-fluoro modified nucleotide with phosphorothioate linkage
  modified_base 40: mod_base = OTHER; note = 2'-O-methyl modified nucleotide with phosphorothioate linkage
  modified_base 41: mod_base = OTHER; note = 2'-fluoro modified nucleotide
  modified_base 44: mod_base = OTHER; note = 2'-fluoro modified nucleotide
  modified_base 55: mod_base = OTHER; note = Nucleotide with phosphorothioate linkage
  modified_base 73: mod_base = OTHER; note = Nucleotide with phosphorothioate linkage
  modified_base 74: mod_base = OTHER; note = Nucleotide with phosphorothioate linkage

SEQ ID NO: 921 - RNA, 75 nt, synthetic construct; identical to SEQ ID NO: 897
  source 1..75: mol_type = other RNA
  modified_base 1: mod_base = OTHER; note = 2'-O-methyl modified nucleotide with phosphorothioate linkage
  modified_base 2: mod_base = OTHER; note = 2'-O-methyl modified nucleotide
  modified_base 12: mod_base = OTHER; note = 2'-O-methyl modified nucleotide
  modified_base 13: mod_base = OTHER; note = Nucleotide with phosphorothioate linkage
  modified_base 16: mod_base = OTHER; note = Nucleotide attached to N-acetylgalactosamine
  modified_base 22: mod_base = OTHER; note = 2'-fluoro modified nucleotide
  modified_base 23: mod_base = OTHER; note = 2'-fluoro modified nucleotide
  modified_base 27: mod_base = OTHER; note = Nucleotide with phosphorothioate linkage
  modified_base 28: mod_base = OTHER; note = 2'-fluoro modified nucleotide
  modified_base 40: mod_base = OTHER; note = Nucleotide with phosphorothioate linkage
  modified_base 41: mod_base = OTHER; note = 2'-fluoro modified nucleotide
  modified_base 46: mod_base = OTHER; note = 2'-fluoro modified nucleotide
  modified_base 55: mod_base = OTHER; note = 2'-O-methyl modified nucleotide
  modified_base 63: mod_base = OTHER; note = Nucleotide with phosphorothioate linkage
  modified_base 64: mod_base = OTHER; note = Nucleotide with phosphorothioate linkage
  modified_base 67: mod_base = OTHER; note = 2'-fluoro modified nucleotide
  modified_base 73: mod_base = OTHER; note = Nucleotide with phosphorothioate linkage
  modified_base 74: mod_base = OTHER; note = 2'-O-methyl modified nucleotide

SEQ ID NO: 922 - RNA, 75 nt, synthetic construct; identical to SEQ ID NO: 897
  source 1..75: mol_type = other RNA
  modified_base 1: mod_base = OTHER; note = 2'-O-methyl modified nucleotide with phosphorothioate linkage
  modified_base 2: mod_base = OTHER; note = 2'-fluoro modified nucleotide with phosphorothioate linkage
  modified_base 16: mod_base = OTHER; note = Nucleotide attached to N-acetylgalactosamine
  modified_base 18: mod_base = OTHER; note = 2'-fluoro modified nucleotide
  modified_base 19: mod_base = OTHER; note = 2'-fluoro modified nucleotide
  modified_base 20: mod_base = OTHER; note = 2'-fluoro modified nucleotide
  modified_base 23: mod_base = OTHER; note = Nucleotide with phosphorothioate linkage
  modified_base 24: mod_base = OTHER; note = 2'-fluoro modified nucleotide with phosphorothioate linkage
  modified_base 25: mod_base = OTHER; note = Nucleotide with phosphorothioate linkage
  modified_base 27: mod_base = OTHER; note = 2'-fluoro modified nucleotide
  modified_base 31: mod_base = OTHER; note = 2'-fluoro modified nucleotide
  modified_base 34: mod_base = OTHER; note = 2'-fluoro modified nucleotide
  modified_base 44: mod_base = OTHER; note = 2'-fluoro modified nucleotide
  modified_base 48: mod_base = OTHER; note = 2'-fluoro modified nucleotide with phosphorothioate linkage
  modified_base 63: mod_base = OTHER; note = 2'-fluoro modified nucleotide with phosphorothioate linkage
  modified_base 67: mod_base = OTHER; note = 2'-fluoro modified nucleotide
  modified_base 71: mod_base = OTHER; note = 2'-fluoro modified nucleotide
  modified_base 75: mod_base = OTHER; note = 2'-O-methyl modified nucleotide

SEQ ID NO: 923 - RNA, 75 nt, synthetic construct; identical to SEQ ID NO: 897
  source 1..75: mol_type = other RNA
  modified_base 1: mod_base = OTHER; note = 2'-O-methyl modified nucleotide with phosphorothioate linkage
  modified_base 13: mod_base = OTHER; note = 2'-fluoro modified nucleotide with phosphorothioate linkage
  modified_base 16: mod_base = OTHER; note = Nucleotide attached to N-acetylgalactosamine
  modified_base 19: mod_base = OTHER; note = Nucleotide with phosphorothioate linkage
  modified_base 20: mod_base = OTHER; note = 2'-fluoro modified nucleotide
  modified_base 28: mod_base = OTHER; note = 2'-fluoro modified nucleotide
  modified_base 40: mod_base = OTHER; note = 2'-fluoro modified nucleotide
  modified_base 42: mod_base = OTHER; note = 2'-fluoro modified nucleotide
  modified_base 52: mod_base = OTHER; note = 2'-fluoro modified nucleotide with phosphorothioate linkage
  modified_base 67: mod_base = OTHER; note = 2'-fluoro modified nucleotide
  modified_base 74: mod_base = OTHER; note = Nucleotide with phosphorothioate linkage
  modified_base 75: mod_base = OTHER; note = 2'-fluoro modified nucleotide

SEQ ID NO: 924 - RNA, 75 nt, synthetic construct; identical to SEQ ID NO: 897
  source 1..75: mol_type = other RNA
  modified_base 1: mod_base = OTHER; note = 2'-O-methyl modified nucleotide with phosphorothioate linkage
  modified_base 4: mod_base = OTHER; note = 2'-fluoro modified nucleotide with phosphorothioate linkage
  modified_base 16: mod_base = OTHER; note = Nucleotide attached to N-acetylgalactosamine
  modified_base 28: mod_base = OTHER; note = 2'-O-methyl modified nucleotide
  modified_base 43: mod_base = OTHER; note = 2'-fluoro modified nucleotide
  modified_base 46: mod_base = OTHER; note = 2'-fluoro modified nucleotide
  modified_base 55: mod_base = OTHER; note = 2'-fluoro modified nucleotide
  modified_base 60: mod_base = OTHER; note = 2'-fluoro modified nucleotide
  modified_base 61: mod_base = OTHER; note = 2'-fluoro modified nucleotide
  modified_base 73: mod_base = OTHER; note = 2'-fluoro modified nucleotide with phosphorothioate linkage

SEQ ID NO: 925 - RNA, 75 nt, synthetic construct; identical to SEQ ID NO: 897
  source 1..75: mol_type = other RNA
  modified_base 1: mod_base = OTHER; note = 2'-fluoro modified nucleotide with phosphorothioate linkage
  modified_base 2: mod_base = OTHER; note = 2'-O-methyl modified nucleotide with phosphorothioate linkage
  modified_base 12: mod_base = OTHER; note = 2'-O-methyl modified nucleotide
  modified_base 13: mod_base = OTHER; note = Nucleotide with phosphorothioate linkage
  modified_base 16: mod_base = OTHER; note = 2'-fluoro modified nucleotide attached to N-acetylgalactosamine
  modified_base 22: mod_base = OTHER; note = 2'-fluoro modified nucleotide
  modified_base 23: mod_base = OTHER; note = 2'-fluoro modified nucleotide
  modified_base 28: mod_base = OTHER; note = 2'-fluoro modified nucleotide
  modified_base 29: mod_base = OTHER; note = 2'-O-methyl modified nucleotide
  modified_base 44: mod_base = OTHER; note = 2'-fluoro modified nucleotide
  modified_base 53: mod_base = OTHER; note = 2'-fluoro modified nucleotide with phosphorothioate linkage
  modified_base 65: mod_base = OTHER; note = Nucleotide with phosphorothioate linkage
  modified_base 66: mod_base = OTHER; note = Nucleotide with phosphorothioate linkage
  modified_base 67: mod_base = OTHER; note = 2'-fluoro modified nucleotide
  modified_base 73: mod_base = OTHER; note = Nucleotide with phosphorothioate linkage
  modified_base 74: mod_base = OTHER; note = 2'-O-methyl modified nucleotide
  modified_base 75: mod_base = OTHER; note = 2'-fluoro modified nucleotide

SEQ ID NO: 926 - RNA, 75 nt, synthetic construct; identical to SEQ ID NO: 897
  source 1..75: mol_type = other RNA
  modified_base 1: mod_base = OTHER; note = 2'-O-methyl modified nucleotide with phosphorothioate linkage
  modified_base 2: mod_base = OTHER; note = 2'-O-methyl modified nucleotide with phosphorothioate linkage
  modified_base 12: mod_base = OTHER; note = Nucleotide with phosphorothioate linkage
  modified_base 16: mod_base = OTHER; note = Nucleotide attached to N-acetylgalactosamine
  modified_base 19: mod_base = OTHER; note = 2'-fluoro modified nucleotide
  modified_base 22: mod_base = OTHER; note = 2'-fluoro modified nucleotide
  modified_base 23: mod_base = OTHER; note = 2'-fluoro modified nucleotide
  modified_base 31: mod_base = OTHER; note = 2'-O-methyl modified nucleotide
  modified_base 50: mod_base = OTHER; note = Nucleotide with phosphorothioate linkage
  modified_base 51: mod_base = OTHER; note = 2'-fluoro modified nucleotide
  modified_base 63: mod_base = OTHER; note = Nucleotide with phosphorothioate linkage
  modified_base 66: mod_base = OTHER; note = 2'-fluoro modified nucleotide
  modified_base 73: mod_base = OTHER; note = Nucleotide with phosphorothioate linkage
  modified_base 74: mod_base = OTHER; note = 2'-O-methyl modified nucleotide

SEQ ID NO: 927 - RNA, 75 nt, synthetic construct; identical to SEQ ID NO: 897
  source 1..75: mol_type = other RNA
  modified_base 1: mod_base = OTHER; note = 2'-O-methyl modified nucleotide with phosphorothioate linkage
  modified_base 2: mod_base = OTHER; note = 2'-O-methyl modified nucleotide with phosphorothioate linkage
  modified_base 14: mod_base = OTHER; note = 2'-fluoro modified nucleotide
  modified_base 16: mod_base = OTHER; note = 2'-fluoro modified nucleotide
  modified_base 19: mod_base = OTHER; note = Nucleotide attached to N-acetylgalactosamine
  modified_base 22: mod_base = OTHER; note = 2'-fluoro modified nucleotide
  modified_base 24: mod_base = OTHER; note = 2'-fluoro modified nucleotide
  modified_base 40: mod_base = OTHER; note = Nucleotide with phosphorothioate linkage
  modified_base 43: mod_base = OTHER; note = 2'-fluoro modified nucleotide
  modified_base 44: mod_base = OTHER; note = 2'-fluoro modified nucleotide
  modified_base 45: mod_base = OTHER; note = 2'-fluoro modified nucleotide with phosphorothioate linkage
  modified_base 51: mod_base = OTHER; note = 2'-fluoro modified nucleotide
  modified_base 60: mod_base = OTHER; note = 2'-fluoro modified nucleotide
  modified_base 73: mod_base = OTHER; note = Nucleotide with phosphorothioate linkage

SEQ ID NO: 928 - RNA, 75 nt, synthetic construct; identical to SEQ ID NO: 897
  source 1..75: mol_type = other RNA
  modified_base 1: mod_base = OTHER; note = 2'-O-methyl modified nucleotide with phosphorothioate linkage
  modified_base 2: mod_base = OTHER; note = 2'-O-methyl modified nucleotide with phosphorothioate linkage
  modified_base 12: mod_base = OTHER; note = Nucleotide with phosphorothioate linkage
  modified_base 13: mod_base = OTHER; note = 2'-fluoro modified nucleotide with phosphorothioate linkage
  modified_base 19: mod_base = OTHER; note = Nucleotide attached to N-acetylgalactosamine
  modified_base 23: mod_base = OTHER; note = Nucleotide with phosphorothioate linkage
  modified_base 24: mod_base = OTHER; note = 2'-fluoro modified nucleotide
  modified_base 43: mod_base = OTHER; note = 2'-fluoro modified nucleotide
  modified_base 51: mod_base = OTHER; note = Nucleotide with phosphorothioate linkage
  modified_base 58: mod_base = OTHER; note = 2'-O-methyl modified nucleotide with phosphorothioate linkage
  modified_base 60: mod_base = OTHER; note = 2'-fluoro modified nucleotide
  modified_base 67: mod_base = OTHER; note = 2'-fluoro modified nucleotide
  modified_base 69: mod_base = OTHER; note = 2'-fluoro modified nucleotide
  modified_base 73: mod_base = OTHER; note = Nucleotide with phosphorothioate linkage
  modified_base 74: mod_base = OTHER; note = 2'-O-methyl modified nucleotide

SEQ ID NO: 929 - RNA, 75 nt, synthetic construct; identical to SEQ ID NO: 897
  source 1..75: mol_type = other RNA
  modified_base 1: mod_base = OTHER; note = 2'-O-methyl modified nucleotide with phosphorothioate linkage
  modified_base 2: mod_base = OTHER; note = 2'-fluoro modified nucleotide
  modified_base 19: mod_base = OTHER; note = Nucleotide with phosphorothioate linkage attached to N-acetylgalactosamine
  modified_base 20: mod_base = OTHER; note = 2'-fluoro modified nucleotide
  modified_base 23: mod_base = OTHER; note = Nucleotide with phosphorothioate linkage
  modified_base 24: mod_base = OTHER; note = 2'-fluoro modified nucleotide
  modified_base 28: mod_base = OTHER; note = 2'-fluoro modified nucleotide
  modified_base 38: mod_base = OTHER; note = Nucleotide with phosphorothioate linkage
  modified_base 39: mod_base = OTHER; note = 2'-fluoro modified nucleotide
  modified_base 51: mod_base = OTHER; note = Nucleotide with phosphorothioate linkage
  modified_base 60: mod_base = OTHER; note = 2'-fluoro modified nucleotide
  modified_base 65: mod_base = OTHER; note = Nucleotide with phosphorothioate linkage
  modified_base 73: mod_base = OTHER; note = Nucleotide with phosphorothioate linkage
  modified_base 74: mod_base = OTHER; note = 2'-O-methyl modified nucleotide

SEQ ID NO: 930 - RNA, 75 nt, synthetic construct; identical to SEQ ID NO: 897
  source 1..75: mol_type = other RNA
  modified_base 1: mod_base = OTHER; note = 2'-O-methyl modified nucleotide with phosphorothioate linkage
  modified_base 2: mod_base = OTHER; note = 2'-O-methyl modified nucleotide
  modified_base 13: mod_base = OTHER; note = Nucleotide with phosphorothioate linkage
  modified_base 14: mod_base = OTHER; note = 2'-fluoro modified nucleotide
  modified_base 19: mod_base = OTHER; note = Nucleotide attached to N-acetylgalactosamine
  modified_base 22: mod_base = OTHER; note = 2'-fluoro modified nucleotide
  modified_base 23: mod_base = OTHER; note = 2'-fluoro modified nucleotide
  modified_base 27: mod_base = OTHER; note = 2'-fluoro modified nucleotide with phosphorothioate linkage
  modified_base 40: mod_base = OTHER; note = 2'-O-methyl modified nucleotide with phosphorothioate linkage
  modified_base 41: mod_base = OTHER; note = 2'-fluoro modified nucleotide
  modified_base 44: mod_base = OTHER; note = 2'-fluoro modified nucleotide
  modified_base 55: mod_base = OTHER; note = Nucleotide with phosphorothioate linkage
  modified_base 73: mod_base = OTHER; note = Nucleotide with phosphorothioate linkage
  modified_base 74: mod_base = OTHER; note = Nucleotide with phosphorothioate linkage

SEQ ID NO: 931 - RNA, 75 nt, synthetic construct; identical to SEQ ID NO: 897
  source 1..75: mol_type = other RNA
  modified_base 1: mod_base = OTHER; note = 2'-O-methyl modified nucleotide with phosphorothioate linkage
  modified_base 2: mod_base = OTHER; note = 2'-O-methyl modified nucleotide
  modified_base 12: mod_base = OTHER; note = 2'-O-methyl modified nucleotide
  modified_base 13: mod_base = OTHER; note = Nucleotide with phosphorothioate linkage
  modified_base 19: mod_base = OTHER; note = Nucleotide attached to N-acetylgalactosamine
  modified_base 22: mod_base = OTHER; note = 2'-fluoro modified nucleotide
  modified_base 23: mod_base = OTHER; note = 2'-fluoro modified nucleotide
  modified_base 27: mod_base = OTHER; note = Nucleotide with phosphorothioate linkage
  modified_base 28: mod_base = OTHER; note = 2'-fluoro modified nucleotide
  modified_base 40: mod_base = OTHER; note = Nucleotide with phosphorothioate linkage
  modified_base 41: mod_base = OTHER; note = 2'-fluoro modified nucleotide
  modified_base 46: mod_base = OTHER; note = 2'-fluoro modified nucleotide
  modified_base 55: mod_base = OTHER; note = 2'-O-methyl modified nucleotide
  modified_base 63: mod_base = OTHER; note = Nucleotide with phosphorothioate linkage
  modified_base 64: mod_base = OTHER; note = Nucleotide with phosphorothioate linkage
  modified_base 67: mod_base = OTHER; note = 2'-fluoro modified nucleotide
  modified_base 73: mod_base = OTHER; note = Nucleotide with phosphorothioate linkage
  modified_base 74: mod_base = OTHER; note = 2'-O-methyl modified nucleotide

SEQ ID NO: 932 - RNA, 75 nt, synthetic construct; identical to SEQ ID NO: 897
  source 1..75: mol_type = other RNA
  modified_base 1: mod_base = OTHER; note = 2'-O-methyl modified nucleotide with phosphorothioate linkage
  modified_base 2: mod_base = OTHER; note = 2'-fluoro modified nucleotide with phosphorothioate linkage
  modified_base 18: mod_base = OTHER; note = 2'-fluoro modified nucleotide
  modified_base 19: mod_base = OTHER; note = 2'-fluoro modified nucleotide attached to N-acetylgalactosamine
  modified_base 20: mod_base = OTHER; note = 2'-fluoro modified nucleotide
  modified_base 23: mod_base = OTHER; note = Nucleotide with phosphorothioate linkage
  modified_base 24: mod_base = OTHER; note = 2'-fluoro modified nucleotide with phosphorothioate linkage
  modified_base 25: mod_base = OTHER; note = Nucleotide with phosphorothioate linkage
  modified_base 27: mod_base = OTHER; note = 2'-fluoro modified nucleotide
  modified_base 31: mod_base = OTHER; note = 2'-fluoro modified nucleotide
  modified_base 34: mod_base = OTHER; note = 2'-fluoro modified nucleotide
  modified_base 44: mod_base = OTHER; note = 2'-fluoro modified nucleotide
  modified_base 48: mod_base = OTHER; note = 2'-fluoro modified nucleotide with phosphorothioate linkage
  modified_base 63: mod_base = OTHER; note = 2'-fluoro modified nucleotide with phosphorothioate linkage
  modified_base 67: mod_base = OTHER; note = 2'-fluoro modified nucleotide
  modified_base 71: mod_base = OTHER; note = 2'-fluoro modified nucleotide
  modified_base 75: mod_base = OTHER; note = 2'-O-methyl modified nucleotide

SEQ ID NO: 933 - RNA, 75 nt, synthetic construct; identical to SEQ ID NO: 897
  source 1..75: mol_type = other RNA
  modified_base 1: mod_base = OTHER; note = 2'-O-methyl modified nucleotide with phosphorothioate linkage
  modified_base 13: mod_base = OTHER; note = 2'-fluoro modified nucleotide with phosphorothioate linkage
  modified_base 19: mod_base = OTHER; note = Nucleotide with phosphorothioate linkage attached to N-acetylgalactosamine
  modified_base 20: mod_base = OTHER; note = 2'-fluoro modified nucleotide
  modified_base 28: mod_base = OTHER; note = 2'-fluoro modified nucleotide
  modified_base 40: mod_base = OTHER; note = 2'-fluoro modified nucleotide
  modified_base 42: mod_base = OTHER; note = 2'-fluoro modified nucleotide
  modified_base 52: mod_base = OTHER; note = 2'-fluoro modified nucleotide with phosphorothioate linkage
  modified_base 67: mod_base = OTHER; note = 2'-fluoro modified nucleotide
  modified_base 74: mod_base = OTHER; note = Nucleotide with phosphorothioate linkage
  modified_base 75: mod_base = OTHER; note = 2'-fluoro modified nucleotide

SEQ ID NO: 934 - RNA, 75 nt, synthetic construct; identical to SEQ ID NO: 897
  source 1..75: mol_type = other RNA
  modified_base 1: mod_base = OTHER; note = 2'-O-methyl modified nucleotide with phosphorothioate linkage
  modified_base 4: mod_base = OTHER; note = 2'-fluoro modified nucleotide with phosphorothioate linkage
  modified_base 19: mod_base = OTHER; note = Nucleotide attached to N-acetylgalactosamine
  modified_base 28: mod_base = OTHER; note = 2'-O-methyl modified nucleotide
  modified_base 43: mod_base = OTHER; note = 2'-fluoro modified nucleotide
  modified_base 46: mod_base = OTHER; note = 2'-fluoro modified nucleotide
  modified_base 55: mod_base = OTHER; note = 2'-fluoro modified nucleotide
  modified_base 60: mod_base = OTHER; note = 2'-fluoro modified nucleotide
  modified_base 61: mod_base = OTHER; note = 2'-fluoro modified nucleotide
  modified_base 73: mod_base = OTHER; note = 2'-fluoro modified nucleotide with phosphorothioate linkage

SEQ ID NO: 935 - RNA, 75 nt, synthetic construct; identical to SEQ ID NO: 897
  source 1..75: mol_type = other RNA
  modified_base 1: mod_base = OTHER; note = 2'-fluoro modified nucleotide with phosphorothioate linkage
  modified_base 2: mod_base = OTHER; note = 2'-O-methyl modified nucleotide with phosphorothioate linkage
  modified_base 12: mod_base = OTHER; note = 2'-O-methyl modified nucleotide
  modified_base 13: mod_base = OTHER; note = Nucleotide with phosphorothioate linkage
  modified_base 16: mod_base = OTHER; note = 2'-fluoro modified nucleotide
  modified_base 19: mod_base = OTHER; note = Nucleotide attached to N-acetylgalactosamine
  modified_base 22: mod_base = OTHER; note = 2'-fluoro modified nucleotide
  modified_base 23: mod_base = OTHER; note = 2'-fluoro modified nucleotide
  modified_base 28: mod_base = OTHER; note = 2'-fluoro modified nucleotide
  modified_base 29: mod_base = OTHER; note = 2'-O-methyl modified nucleotide
  modified_base 44: mod_base = OTHER; note = 2'-fluoro modified nucleotide
  modified_base 53: mod_base = OTHER; note = 2'-fluoro modified nucleotide with phosphorothioate linkage
  modified_base 65: mod_base = OTHER; note = Nucleotide with phosphorothioate linkage
  modified_base 66: mod_base = OTHER; note = Nucleotide with phosphorothioate linkage
  modified_base 67: mod_base = OTHER; note = 2'-fluoro modified nucleotide
  modified_base 73: mod_base = OTHER; note = Nucleotide with phosphorothioate linkage
  modified_base 74: mod_base = OTHER; note = 2'-O-methyl modified nucleotide
  modified_base 75: mod_base = OTHER; note = 2'-fluoro modified nucleotide

SEQ ID NO: 936 - RNA, 75 nt, synthetic construct; identical to SEQ ID NO: 897
  source 1..75: mol_type = other RNA
  modified_base 1: mod_base = OTHER; note = 2'-O-methyl modified nucleotide with phosphorothioate linkage
  modified_base 2: mod_base = OTHER; note = 2'-O-methyl modified nucleotide with phosphorothioate linkage
  modified_base 12: mod_base = OTHER; note = Nucleotide with phosphorothioate linkage
  modified_base 19: mod_base = OTHER; note = 2'-fluoro modified nucleotide attached to N-acetylgalactosamine
  modified_base 22: mod_base = OTHER; note = 2'-fluoro modified nucleotide
  modified_base 23: mod_base = OTHER; note = 2'-fluoro modified nucleotide
  modified_base 31: mod_base = OTHER; note = 2'-O-methyl modified nucleotide
  modified_base 50: mod_base = OTHER; note = Nucleotide with phosphorothioate linkage
  modified_base 51: mod_base = OTHER; note = 2'-fluoro modified nucleotide
  modified_base 63: mod_base = OTHER; note = Nucleotide with phosphorothioate linkage
  modified_base 66: mod_base = OTHER; note = 2'-fluoro modified nucleotide
  modified_base 73: mod_base = OTHER; note = Nucleotide with phosphorothioate linkage
  modified_base 74: mod_base = OTHER; note = 2'-O-methyl modified nucleotide

SEQ ID NO: 937 - RNA, 75 nt, synthetic construct; identical to SEQ ID NO: 897
  source 1..75: mol_type = other RNA
  modified_base 1: mod_base = OTHER; note = 2'-O-methyl modified nucleotide with phosphorothioate linkage
  modified_base 2: mod_base = OTHER; note = 2'-O-methyl modified nucleotide with phosphorothioate linkage
  modified_base 14: mod_base = OTHER; note = 2'-fluoro modified nucleotide
  modified_base 16: mod_base = OTHER; note = 2'-fluoro modified nucleotide
  modified_base 22: mod_base = OTHER; note = 2'-fluoro modified nucleotide
  modified_base 24: mod_base = OTHER; note = 2'-fluoro modified nucleotide
  modified_base 40: mod_base = OTHER; note = Nucleotide with phosphorothioate linkage
  modified_base 43: mod_base = OTHER; note = 2'-fluoro modified nucleotide
  modified_base 44: mod_base = OTHER; note = 2'-fluoro modified nucleotide
  modified_base 45: mod_base = OTHER; note = 2'-fluoro modified nucleotide with phosphorothioate linkage
  modified_base 47: mod_base = OTHER; note = Nucleotide attached to N-acetylgalactosamine
  modified_base 51: mod_base = OTHER; note = 2'-fluoro modified nucleotide
  modified_base 60: mod_base = OTHER; note = 2'-fluoro modified nucleotide
  modified_base 73: mod_base = OTHER; note = Nucleotide with phosphorothioate linkage

SEQ ID NO: 938 - RNA, 75 nt, synthetic construct; identical to SEQ ID NO: 897
  source 1..75: mol_type = other RNA
  modified_base 1: mod_base = OTHER; note = 2'-O-methyl modified nucleotide with phosphorothioate linkage
  modified_base 2: mod_base = OTHER; note = 2'-O-methyl modified nucleotide with phosphorothioate linkage
  modified_base 12: mod_base = OTHER; note = Nucleotide with phosphorothioate linkage
  modified_base 13: mod_base = OTHER; note = 2'-fluoro modified nucleotide with phosphorothioate linkage
  modified_base 23: mod_base = OTHER; note = Nucleotide with phosphorothioate linkage
  modified_base 24: mod_base = OTHER; note = 2'-fluoro modified nucleotide
  modified_base 43: mod_base = OTHER; note = 2'-fluoro modified nucleotide
  modified_base 47: mod_base = OTHER; note = Nucleotide attached to N-acetylgalactosamine
  modified_base 51: mod_base = OTHER; note = Nucleotide with phosphorothioate linkage
  modified_base 58: mod_base = OTHER; note = 2'-O-methyl modified nucleotide with phosphorothioate linkage
  modified_base 60: mod_base = OTHER; note = 2'-fluoro modified nucleotide
  modified_base 67: mod_base = OTHER; note = 2'-fluoro modified nucleotide
  modified_base 69: mod_base = OTHER; note = 2'-fluoro modified nucleotide
  modified_base 73: mod_base = OTHER; note = Nucleotide with phosphorothioate linkage
  modified_base 74: mod_base = OTHER; note = 2'-O-methyl modified nucleotide

SEQ ID NO: 939 - RNA, 75 nt, synthetic construct; identical to SEQ ID NO: 897
  source 1..75: mol_type = other RNA
  modified_base 1: mod_base = OTHER; note = 2'-O-methyl modified nucleotide with phosphorothioate linkage
  modified_base 2: mod_base = OTHER; note = 2'-fluoro modified nucleotide
  modified_base 19: mod_base = OTHER; note = Nucleotide with phosphorothioate linkage
  modified_base 20: mod_base = OTHER; note = 2'-fluoro modified nucleotide
  modified_base 23: mod_base = OTHER; note = Nucleotide with phosphorothioate linkage
  modified_base 24: mod_base = OTHER; note = 2'-fluoro modified nucleotide
  modified_base 28: mod_base = OTHER; note = 2'-fluoro modified nucleotide
  modified_base 38: mod_base = OTHER; note = Nucleotide with phosphorothioate linkage
  modified_base 39: mod_base = OTHER; note = 2'-fluoro modified nucleotide
  modified_base 47: mod_base = OTHER; note = Nucleotide attached to N-acetylgalactosamine
  modified_base 51: mod_base = OTHER; note = Nucleotide with phosphorothioate linkage
  modified_base 60: mod_base = OTHER; note = 2'-fluoro modified nucleotide
  modified_base 65: mod_base = OTHER; note = Nucleotide with phosphorothioate linkage
  modified_base 73: mod_base = OTHER; note = Nucleotide with phosphorothioate linkage
  modified_base 74: mod_base = OTHER; note = 2'-O-methyl modified nucleotide

SEQ ID NO: 940 - RNA, 75 nt, synthetic construct; identical to SEQ ID NO: 897
  source 1..75: mol_type = other RNA
  modified_base 1: mod_base = OTHER; note = 2'-O-methyl modified nucleotide with phosphorothioate linkage
  modified_base 2: mod_base = OTHER; note = 2'-O-methyl modified nucleotide
  modified_base 13: mod_base = OTHER; note = Nucleotide with phosphorothioate linkage
  modified_base 14: mod_base = OTHER; note = 2'-fluoro modified nucleotide
  modified_base 22: mod_base = OTHER; note = 2'-fluoro modified nucleotide
  modified_base 23: mod_base = OTHER; note = 2'-fluoro modified nucleotide
  modified_base 27: mod_base = OTHER; note = 2'-fluoro modified nucleotide with phosphorothioate linkage
  modified_base 40: mod_base = OTHER; note = 2'-O-methyl modified nucleotide with phosphorothioate linkage
  modified_base 41: mod_base = OTHER; note = 2'-fluoro modified nucleotide
  modified_base 44: mod_base = OTHER; note = 2'-fluoro modified nucleotide
  modified_base 47: mod_base = OTHER; note = Nucleotide attached to N-acetylgalactosamine
  modified_base 55: mod_base = OTHER; note = Nucleotide with phosphorothioate linkage
  modified_base 73: mod_base = OTHER; note = Nucleotide with phosphorothioate linkage
  modified_base 74: mod_base = OTHER; note = Nucleotide with phosphorothioate linkage

SEQ ID NO: 941 - RNA, 75 nt, synthetic construct; identical to SEQ ID NO: 897
  source 1..75: mol_type = other RNA
  modified_base 1: mod_base = OTHER; note = 2'-O-methyl modified nucleotide with phosphorothioate linkage
  modified_base 2: mod_base = OTHER; note = 2'-O-methyl modified nucleotide
  modified_base 12: mod_base = OTHER; note = 2'-O-methyl modified nucleotide
  modified_base 13: mod_base = OTHER; note = Nucleotide with phosphorothioate linkage
  modified_base 22: mod_base = OTHER; note = 2'-fluoro modified nucleotide
  modified_base 23: mod_base = OTHER; note = 2'-fluoro modified nucleotide
  modified_base 27: mod_base = OTHER; note = Nucleotide with phosphorothioate linkage
  modified_base 28: mod_base = OTHER; note = 2'-fluoro modified nucleotide
  modified_base 40: mod_base = OTHER; note = Nucleotide with phosphorothioate linkage
  modified_base 41: mod_base = OTHER; note = 2'-fluoro modified nucleotide
  modified_base 46: mod_base = OTHER; note = 2'-fluoro modified nucleotide
  modified_base 47: mod_base = OTHER; note = Nucleotide attached to N-acetylgalactosamine
  modified_base 55: mod_base = OTHER; note = 2'-O-methyl modified nucleotide
  modified_base 63: mod_base = OTHER; note = Nucleotide with phosphorothioate linkage
  modified_base 64: mod_base = OTHER; note = Nucleotide with phosphorothioate linkage
  modified_base 67: mod_base = OTHER; note = 2'-fluoro modified nucleotide
  modified_base 73: mod_base = OTHER; note = Nucleotide with phosphorothioate linkage
  modified_base 74: mod_base = OTHER; note = 2'-O-methyl modified nucleotide

SEQ ID NO: 942 - RNA, 75 nt, synthetic construct; identical to SEQ ID NO: 897
  source 1..75: mol_type = other RNA
  modified_base 1: mod_base = OTHER; note = 2'-O-methyl modified nucleotide with phosphorothioate linkage
  modified_base 2: mod_base = OTHER; note = 2'-fluoro modified nucleotide with phosphorothioate linkage
  modified_base 18: mod_base = OTHER; note = 2'-fluoro modified nucleotide
  modified_base 19: mod_base = OTHER; note = 2'-fluoro modified nucleotide
  modified_base 20: mod_base = OTHER; note = 2'-fluoro modified nucleotide
  modified_base 23: mod_base = OTHER; note = Nucleotide with phosphorothioate linkage
  modified_base 24: mod_base = OTHER; note = 2'-fluoro modified nucleotide with phosphorothioate linkage
  modified_base 25: mod_base = OTHER; note = Nucleotide with phosphorothioate linkage
  modified_base 27: mod_base = OTHER; note = 2'-fluoro modified nucleotide
  modified_base 31: mod_base = OTHER; note = 2'-fluoro modified nucleotide
  modified_base 34: mod_base = OTHER; note = 2'-fluoro modified nucleotide
  modified_base 44: mod_base = OTHER; note = 2'-fluoro modified nucleotide
  modified_base 47: mod_base = OTHER; note = Nucleotide attached to N-acetylgalactosamine
  modified_base 48: mod_base = OTHER; note = 2'-fluoro modified nucleotide with phosphorothioate linkage
  modified_base 63: mod_base = OTHER; note = 2'-fluoro modified nucleotide with phosphorothioate linkage
  modified_base 67: mod_base = OTHER; note = 2'-fluoro modified nucleotide
  modified_base 71: mod_base = OTHER; note = 2'-fluoro modified nucleotide
  modified_base 75: mod_base = OTHER; note = 2'-O-methyl modified nucleotide

SEQ ID NO: 943 - RNA, 75 nt, synthetic construct; identical to SEQ ID NO: 897
  source 1..75: mol_type = other RNA
  modified_base 1: mod_base = OTHER; note = 2'-O-methyl modified nucleotide with phosphorothioate linkage
  modified_base 13: mod_base = OTHER; note = 2'-fluoro modified nucleotide with phosphorothioate linkage
  modified_base 19: mod_base = OTHER; note = Nucleotide with phosphorothioate linkage
  modified_base 20: mod_base = OTHER; note = 2'-fluoro modified nucleotide
  modified_base 28: mod_base = OTHER; note = 2'-fluoro modified nucleotide
  modified_base 40: mod_base = OTHER; note = 2'-fluoro modified nucleotide
  modified_base 42: mod_base = OTHER; note = 2'-fluoro modified nucleotide
  modified_base 47: mod_base = OTHER; note = Nucleotide attached to N-acetylgalactosamine
  modified_base 52: mod_base = OTHER; note = 2'-fluoro modified nucleotide with phosphorothioate linkage
  modified_base 67: mod_base = OTHER; note = 2'-fluoro modified nucleotide
  modified_base 74: mod_base = OTHER; note = Nucleotide with phosphorothioate linkage
  modified_base 75: mod_base = OTHER; note = 2'-fluoro modified nucleotide

SEQ ID NO: 944 - RNA, 75 nt, synthetic construct; identical to SEQ ID NO: 897
  source 1..75: mol_type = other RNA
  modified_base 1: mod_base = OTHER; note = 2'-O-methyl modified nucleotide with phosphorothioate linkage
  modified_base 4: mod_base = OTHER; note = 2'-fluoro modified nucleotide with phosphorothioate linkage
  modified_base 28: mod_base = OTHER; note = 2'-O-methyl modified nucleotide
  modified_base 43: mod_base = OTHER; note = 2'-fluoro modified nucleotide
  modified_base 46: mod_base = OTHER; note = 2'-fluoro modified nucleotide
  modified_base 47: mod_base = OTHER; note = Nucleotide attached to N-acetylgalactosamine
  modified_base 55: mod_base = OTHER; note = 2'-fluoro modified nucleotide
  modified_base 60: mod_base = OTHER; note = 2'-fluoro modified nucleotide
  modified_base 61: mod_base = OTHER; note = 2'-fluoro modified nucleotide
  modified_base 73: mod_base = OTHER; note = 2'-fluoro modified nucleotide with phosphorothioate linkage

SEQ ID NO: 945 - RNA, 75 nt, synthetic construct; identical to SEQ ID NO: 897
  source 1..75: mol_type = other RNA
  modified_base 1: mod_base = OTHER; note = 2'-fluoro modified nucleotide with phosphorothioate linkage
  modified_base 2: mod_base = OTHER; note = 2'-O-methyl modified nucleotide with phosphorothioate linkage
  modified_base 12: mod_base = OTHER; note = 2'-O-methyl modified nucleotide
  modified_base 13: mod_base = OTHER; note = Nucleotide with phosphorothioate linkage
  modified_base 16: mod_base = OTHER; note = 2'-fluoro modified nucleotide
  modified_base 22: mod_base = OTHER; note = 2'-fluoro modified nucleotide
  modified_base 23: mod_base = OTHER; note = 2'-fluoro modified nucleotide
  modified_base 28: mod_base = OTHER; note = 2'-fluoro modified nucleotide
  modified_base 29: mod_base = OTHER; note = 2'-O-methyl modified nucleotide
  modified_base 44: mod_base = OTHER; note = 2'-fluoro modified nucleotide
  modified_base 47: mod_base = OTHER; note = Nucleotide attached to N-acetylgalactosamine
  modified_base 53: mod_base = OTHER; note = 2'-fluoro modified nucleotide with phosphorothioate linkage
  modified_base 65: mod_base = OTHER; note = Nucleotide with phosphorothioate linkage
  modified_base 66: mod_base = OTHER; note = Nucleotide with phosphorothioate linkage
  modified_base 67: mod_base = OTHER; note = 2'-fluoro modified nucleotide
  modified_base 73: mod_base = OTHER; note = Nucleotide with phosphorothioate linkage
  modified_base 74: mod_base = OTHER; note = 2'-O-methyl modified nucleotide
  modified_base 75: mod_base = OTHER; note = 2'-fluoro modified nucleotide

SEQ ID NO: 946 - RNA, 75 nt, synthetic construct; identical to SEQ ID NO: 897
  source 1..75: mol_type = other RNA
  modified_base 1: mod_base = OTHER; note = 2'-O-methyl modified nucleotide with phosphorothioate linkage
  modified_base 2: mod_base = OTHER; note = 2'-O-methyl modified nucleotide with phosphorothioate linkage
  modified_base 12: mod_base = OTHER; note = Nucleotide with phosphorothioate linkage
  modified_base 19: mod_base = OTHER; note = 2'-fluoro modified nucleotide
  modified_base 22: mod_base = OTHER; note = 2'-fluoro modified nucleotide
  modified_base 23: mod_base = OTHER; note = 2'-fluoro modified nucleotide
  modified_base 31: mod_base = OTHER; note = 2'-O-methyl modified nucleotide
  modified_base 47: mod_base = OTHER; note = Nucleotide attached to N-acetylgalactosamine
  modified_base 50: mod_base = OTHER; note = Nucleotide with phosphorothioate linkage
  modified_base 51: mod_base = OTHER; note = 2'-fluoro modified nucleotide
  modified_base 63: mod_base = OTHER; note = Nucleotide with phosphorothioate linkage
  modified_base 66: mod_base = OTHER; note = 2'-fluoro modified nucleotide
  modified_base 73: mod_base = OTHER; note = Nucleotide with phosphorothioate linkage
  modified_base 74: mod_base = OTHER; note = 2'-O-methyl modified nucleotide

SEQ ID NO: 947 - RNA, 75 nt, synthetic construct; identical to SEQ ID NO: 897
  source 1..75: mol_type = other RNA
  modified_base 1: mod_base = OTHER; note = 2'-O-methyl modified nucleotide with phosphorothioate linkage attached to cyanine3 dye
  modified_base 2: mod_base = OTHER; note = 2'-O-methyl modified nucleotide with phosphorothioate linkage
  modified_base 14: mod_base = OTHER; note = 2'-fluoro modified nucleotide
  modified_base 16: mod_base = OTHER; note = 2'-fluoro modified nucleotide attached to N-acetylgalactosamine
  modified_base 22: mod_base = OTHER; note = 2'-fluoro modified nucleotide
  modified_base 24: mod_base = OTHER; note = 2'-fluoro modified nucleotide
  modified_base 40: mod_base = OTHER; note = Nucleotide with phosphorothioate linkage
  modified_base 43: mod_base = OTHER; note = 2'-fluoro modified nucleotide
  modified_base 44: mod_base = OTHER; note = 2'-fluoro modified nucleotide
  modified_base 45: mod_base = OTHER; note = 2'-fluoro modified nucleotide with phosphorothioate linkage
  modified_base 51: mod_base = OTHER; note = 2'-fluoro modified nucleotide
  modified_base 60: mod_base = OTHER; note = 2'-fluoro modified nucleotide
  modified_base 73: mod_base = OTHER; note = Nucleotide with phosphorothioate linkage

SEQ ID NO: 948 - RNA, 75 nt, synthetic construct; identical to SEQ ID NO: 897
  source 1..75: mol_type = other RNA
  modified_base 1: mod_base = OTHER; note = 2'-O-methyl modified nucleotide with phosphorothioate linkage attached to cyanine3 dye
  modified_base 2: mod_base = OTHER; note = 2'-O-methyl modified nucleotide with phosphorothioate linkage
  modified_base 12: mod_base = OTHER; note = Nucleotide with phosphorothioate linkage
  modified_base 13: mod_base = OTHER; note = 2'-fluoro modified nucleotide with phosphorothioate linkage
  modified_base 16: mod_base = OTHER; note = Nucleotide attached to N-acetylgalactosamine
  modified_base 23: mod_base = OTHER; note = Nucleotide with phosphorothioate linkage
  modified_base 24: mod_base = OTHER; note = 2'-fluoro modified nucleotide
  modified_base 43: mod_base = OTHER; note = 2'-fluoro modified nucleotide
  modified_base 51: mod_base = OTHER; note = Nucleotide with phosphorothioate linkage
  modified_base 58: mod_base = OTHER; note = 2'-O-methyl modified nucleotide with phosphorothioate linkage
  modified_base 60: mod_base = OTHER; note = 2'-fluoro modified nucleotide
  modified_base 67: mod_base = OTHER; note = 2'-fluoro modified nucleotide
  modified_base 69: mod_base = OTHER; note = 2'-fluoro modified nucleotide
  modified_base 73: mod_base = OTHER; note = Nucleotide with phosphorothioate linkage
  modified_base 74: mod_base = OTHER; note = 2'-O-methyl modified nucleotide

SEQ ID NO: 949 - RNA, 75 nt, synthetic construct; identical to SEQ ID NO: 897
  source 1..75: mol_type = other RNA
  modified_base 1: mod_base = OTHER; note = 2'-O-methyl modified nucleotide with phosphorothioate linkage attached to cyanine3 dye
  modified_base 2: mod_base = OTHER; note = 2'-fluoro modified nucleotide
  modified_base 16: mod_base = OTHER; note = Nucleotide attached to N-acetylgalactosamine
  modified_base 19: mod_base = OTHER; note = Nucleotide with phosphorothioate linkage
  modified_base 20: mod_base = OTHER; note = 2'-fluoro modified nucleotide
  modified_base 23: mod_base = OTHER; note = Nucleotide with phosphorothioate linkage
  modified_base 24: mod_base = OTHER; note = 2'-fluoro modified nucleotide
  modified_base 28: mod_base = OTHER; note = 2'-fluoro modified nucleotide
  modified_base 38: mod_base = OTHER; note = Nucleotide with phosphorothioate linkage
  modified_base 39: mod_base = OTHER; note = 2'-fluoro modified nucleotide
  modified_base 51: mod_base = OTHER; note = Nucleotide with phosphorothioate linkage
  modified_base 60: mod_base = OTHER; note = 2'-fluoro modified nucleotide
  modified_base 65: mod_base = OTHER; note = Nucleotide with phosphorothioate linkage
  modified_base 73: mod_base = OTHER; note = Nucleotide with phosphorothioate linkage
  modified_base 74: mod_base = OTHER; note = 2'-O-methyl modified nucleotide

SEQ ID NO: 950 - RNA, 75 nt, synthetic construct; identical to SEQ ID NO: 897
  source 1..75: mol_type = other RNA
  modified_base 1: mod_base = OTHER; note = 2'-O-methyl modified nucleotide with phosphorothioate linkage attached to cyanine3 dye
  modified_base 2: mod_base = OTHER; note = 2'-O-methyl modified nucleotide
  modified_base 13: mod_base = OTHER; note = Nucleotide with phosphorothioate linkage
  modified_base 14: mod_base = OTHER; note = 2'-fluoro modified nucleotide
  modified_base 16: mod_base = OTHER; note = Nucleotide attached to N-acetylgalactosamine
  modified_base 22: mod_base = OTHER; note = 2'-fluoro modified nucleotide
  modified_base 23: mod_base = OTHER; note = 2'-fluoro modified nucleotide
  modified_base 27: mod_base = OTHER; note = 2'-fluoro modified nucleotide with phosphorothioate linkage
  modified_base 40: mod_base = OTHER; note = 2'-O-methyl modified nucleotide with phosphorothioate linkage
  modified_base 41: mod_base = OTHER; note = 2'-fluoro modified nucleotide
  modified_base 44: mod_base = OTHER; note = 2'-fluoro modified nucleotide
  modified_base 55: mod_base = OTHER; note = Nucleotide with phosphorothioate linkage
  modified_base 73: mod_base = OTHER; note = Nucleotide with phosphorothioate linkage
  modified_base 74: mod_base = OTHER; note = Nucleotide with phosphorothioate linkage

SEQ ID NO: 951 - RNA, 75 nt, synthetic construct; identical to SEQ ID NO: 897
  source 1..75: mol_type = other RNA
  modified_base 1: mod_base = OTHER; note = 2'-O-methyl modified nucleotide with phosphorothioate linkage attached to cyanine3 dye
  modified_base 2: mod_base = OTHER; note = 2'-O-methyl modified nucleotide
  modified_base 12: mod_base = OTHER; note = 2'-O-methyl modified nucleotide
  modified_base 13: mod_base = OTHER; note = Nucleotide with phosphorothioate linkage
  modified_base 16: mod_base = OTHER; note = Nucleotide attached to N-acetylgalactosamine
  modified_base 22: mod_base = OTHER; note = 2'-fluoro modified nucleotide
  modified_base 23: mod_base = OTHER; note = 2'-fluoro modified nucleotide
  modified_base 27: mod_base = OTHER; note = Nucleotide with phosphorothioate linkage
  modified_base 28: mod_base = OTHER; note = 2'-fluoro modified nucleotide
  modified_base 40: mod_base = OTHER; note = Nucleotide with phosphorothioate linkage
  modified_base 41: mod_base = OTHER; note = 2'-fluoro modified nucleotide
  modified_base 46: mod_base = OTHER; note = 2'-fluoro modified nucleotide
  modified_base 55: mod_base = OTHER; note = 2'-O-methyl modified nucleotide
  modified_base 63: mod_base = OTHER; note = Nucleotide with phosphorothioate linkage
  modified_base 64: mod_base = OTHER; note = Nucleotide with phosphorothioate linkage
  modified_base 67: mod_base = OTHER; note = 2'-fluoro modified nucleotide
  modified_base 73: mod_base = OTHER; note = Nucleotide with phosphorothioate linkage
  modified_base 74: mod_base = OTHER; note = 2'-O-methyl modified nucleotide

SEQ ID NO: 952 - RNA, 75 nt, synthetic construct; identical to SEQ ID NO: 897
  source 1..75: mol_type = other RNA
  modified_base 1: mod_base = OTHER; note = 2'-O-methyl modified nucleotide with phosphorothioate linkage attached to cyanine3 dye
  modified_base 2: mod_base = OTHER; note = 2'-fluoro modified nucleotide with phosphorothioate linkage
  modified_base 16: mod_base = OTHER; note = Nucleotide attached to N-acetylgalactosamine
  modified_base 18: mod_base = OTHER; note = 2'-fluoro modified nucleotide
  modified_base 19: mod_base = OTHER; note = 2'-fluoro modified nucleotide
  modified_base 20: mod_base = OTHER; note = 2'-fluoro modified nucleotide
  modified_base 23: mod_base = OTHER; note = Nucleotide with phosphorothioate linkage
  modified_base 24: mod_base = OTHER; note = 2'-fluoro modified nucleotide with phosphorothioate linkage
  modified_base 25: mod_base = OTHER; note = Nucleotide with phosphorothioate linkage
  modified_base 27: mod_base = OTHER; note = 2'-fluoro modified nucleotide
  modified_base 31: mod_base = OTHER; note = 2'-fluoro modified nucleotide
  modified_base 34: mod_base = OTHER; note = 2'-fluoro modified nucleotide
  modified_base 44: mod_base = OTHER; note = 2'-fluoro modified nucleotide
  modified_base 48: mod_base = OTHER; note = 2'-fluoro modified nucleotide with phosphorothioate linkage
  modified_base 63: mod_base = OTHER; note = 2'-fluoro modified nucleotide with phosphorothioate linkage
  modified_base 67: mod_base = OTHER; note = 2'-fluoro modified nucleotide
  modified_base 71: mod_base = OTHER; note = 2'-fluoro modified nucleotide
  modified_base 75: mod_base = OTHER; note = 2'-O-methyl modified nucleotide

SEQ ID NO: 953 - RNA, 75 nt, synthetic construct; identical to SEQ ID NO: 897
  source 1..75: mol_type = other RNA
  modified_base 1: mod_base = OTHER; note = 2'-O-methyl modified nucleotide with phosphorothioate linkage attached to cyanine3 dye
  modified_base 13: mod_base = OTHER; note = 2'-fluoro modified nucleotide with phosphorothioate linkage
  modified_base 16: mod_base = OTHER; note = Nucleotide attached to N-acetylgalactosamine
  modified_base 19: mod_base = OTHER; note = Nucleotide with phosphorothioate linkage
  modified_base 20: mod_base = OTHER; note = 2'-fluoro modified nucleotide
  modified_base 28: mod_base = OTHER; note = 2'-fluoro modified nucleotide
  modified_base 40: mod_base = OTHER; note = 2'-fluoro modified nucleotide
  modified_base 42: mod_base = OTHER; note = 2'-fluoro modified nucleotide
  modified_base 52: mod_base = OTHER; note = 2'-fluoro modified nucleotide with phosphorothioate linkage
  modified_base 67: mod_base = OTHER; note = 2'-fluoro modified nucleotide
  modified_base 74: mod_base = OTHER; note = Nucleotide with phosphorothioate linkage
  modified_base 75: mod_base = OTHER; note = 2'-fluoro modified nucleotide

SEQ ID NO: 954 - RNA, 75 nt, synthetic construct; identical to SEQ ID NO: 897
  source 1..75: mol_type = other RNA
  modified_base 1: mod_base = OTHER; note = 2'-O-methyl modified nucleotide with phosphorothioate linkage attached to cyanine3 dye
  modified_base 4: mod_base = OTHER; note = 2'-fluoro modified nucleotide with phosphorothioate linkage
  modified_base 16: mod_base = OTHER; note = Nucleotide attached to N-acetylgalactosamine
  modified_base 28: mod_base = OTHER; note = 2'-O-methyl modified nucleotide
  modified_base 43: mod_base = OTHER; note = 2'-fluoro modified nucleotide
  modified_base 46: mod_base = OTHER; note = 2'-fluoro modified nucleotide
  modified_base 55: mod_base = OTHER; note = 2'-fluoro modified nucleotide
  modified_base 60: mod_base = OTHER; note = 2'-fluoro modified nucleotide
  modified_base 61: mod_base = OTHER; note = 2'-fluoro modified nucleotide
  modified_base 73: mod_base = OTHER; note = 2'-fluoro modified nucleotide with phosphorothioate linkage

SEQ ID NO: 955 - RNA, 75 nt, synthetic construct; identical to SEQ ID NO: 897
  source 1..75: mol_type = other RNA
  modified_base 1: mod_base = OTHER; note = 2'-fluoro modified nucleotide with phosphorothioate linkage attached to cyanine3 dye
  modified_base 2: mod_base = OTHER; note = 2'-O-methyl modified nucleotide with phosphorothioate linkage
  modified_base 12: mod_base = OTHER; note = 2'-O-methyl modified nucleotide
  modified_base 13: mod_base = OTHER; note = Nucleotide with phosphorothioate linkage
  modified_base 16: mod_base = OTHER; note = 2'-fluoro modified nucleotide attached to N-acetylgalactosamine
  modified_base 22: mod_base = OTHER; note = 2'-fluoro modified nucleotide
  modified_base 23: mod_base = OTHER; note = 2'-fluoro modified nucleotide
  modified_base 28: mod_base = OTHER; note = 2'-fluoro modified nucleotide
  modified_base 29: mod_base = OTHER; note = 2'-O-methyl modified nucleotide
  modified_base 44: mod_base = OTHER; note = 2'-fluoro modified nucleotide
  modified_base 53: mod_base = OTHER; note = 2'-fluoro modified nucleotide with phosphorothioate linkage
  modified_base 65: mod_base = OTHER; note = Nucleotide with phosphorothioate linkage
  modified_base 66: mod_base = OTHER; note = Nucleotide with phosphorothioate linkage
  modified_base 67: mod_base = OTHER; note = 2'-fluoro modified nucleotide
  modified_base 73: mod_base = OTHER; note = Nucleotide with phosphorothioate linkage
  modified_base 74: mod_base = OTHER; note = 2'-O-methyl modified nucleotide
  modified_base 75: mod_base = OTHER; note = 2'-fluoro modified nucleotide

SEQ ID NO: 956 - RNA, 75 nt, synthetic construct; identical to SEQ ID NO: 897
  source 1..75: mol_type = other RNA
  modified_base 1: mod_base = OTHER; note = 2'-O-methyl modified nucleotide with phosphorothioate linkage attached to cyanine3 dye
  modified_base 2: mod_base = OTHER; note = 2'-O-methyl modified nucleotide with phosphorothioate linkage
  modified_base 12: mod_base = OTHER; note = Nucleotide with phosphorothioate linkage
  modified_base 16: mod_base = OTHER; note = Nucleotide attached to N-acetylgalactosamine
  modified_base 19: mod_base = OTHER; note = 2'-fluoro modified nucleotide
  modified_base 22: mod_base = OTHER; note = 2'-fluoro modified nucleotide
  modified_base 23: mod_base = OTHER; note = 2'-fluoro modified nucleotide
  modified_base 31: mod_base = OTHER; note = 2'-O-methyl modified nucleotide
  modified_base 50: mod_base = OTHER; note = Nucleotide with phosphorothioate linkage
  modified_base 51: mod_base = OTHER; note = 2'-fluoro modified nucleotide
  modified_base 63: mod_base = OTHER; note = Nucleotide with phosphorothioate linkage
  modified_base 66: mod_base = OTHER; note = 2'-fluoro modified nucleotide
  modified_base 73: mod_base = OTHER; note = Nucleotide with phosphorothioate linkage
  modified_base 74: mod_base = OTHER; note = 2'-O-methyl modified nucleotide

SEQ ID NO: 957 - RNA, 75 nt, synthetic construct; identical to SEQ ID NO: 897
  source 1..75: mol_type = other RNA
  modified_base 1: mod_base = OTHER; note = 2'-O-methyl modified nucleotide with phosphorothioate linkage attached to cyanine3 dye
  modified_base 2: mod_base = OTHER; note = 2'-O-methyl modified nucleotide with phosphorothioate linkage
  modified_base 14: mod_base = OTHER; note = 2'-fluoro modified nucleotide
  modified_base 16: mod_base = OTHER; note = 2'-fluoro modified nucleotide
  modified_base 19: mod_base = OTHER; note = Nucleotide attached to N-acetylgalactosamine
  modified_base 22: mod_base = OTHER; note = 2'-fluoro modified nucleotide
  modified_base 24: mod_base = OTHER; note = 2'-fluoro modified nucleotide
  modified_base 40: mod_base = OTHER; note = Nucleotide with phosphorothioate linkage
  modified_base 43: mod_base = OTHER; note = 2'-fluoro modified nucleotide
  modified_base 44: mod_base = OTHER; note = 2'-fluoro modified nucleotide
  modified_base 45: mod_base = OTHER; note = 2'-fluoro modified nucleotide with phosphorothioate linkage
  modified_base 51: mod_base = OTHER; note = 2'-fluoro modified nucleotide
  modified_base 60: mod_base = OTHER; note = 2'-fluoro modified nucleotide
  modified_base 73: mod_base = OTHER; note = Nucleotide with phosphorothioate linkage

SEQ ID NO: 958 - RNA, 75 nt, synthetic construct; identical to SEQ ID NO: 897
  source 1..75: mol_type = other RNA
  modified_base 1: mod_base = OTHER; note = 2'-O-methyl modified nucleotide with phosphorothioate linkage attached to cyanine3 dye
  modified_base 2: mod_base = OTHER; note = 2'-O-methyl modified nucleotide with phosphorothioate linkage
  modified_base 12: mod_base = OTHER; note = Nucleotide with phosphorothioate linkage
  modified_base 13: mod_base = OTHER; note = 2'-fluoro modified nucleotide with phosphorothioate linkage
  modified_base 19: mod_base = OTHER; note = Nucleotide attached to N-acetylgalactosamine
  modified_base 23: mod_base = OTHER; note = Nucleotide with phosphorothioate linkage
  modified_base 24: mod_base = OTHER; note = 2'-fluoro modified nucleotide
  modified_base 43: mod_base = OTHER; note = 2'-fluoro modified nucleotide
  modified_base 51: mod_base = OTHER; note = Nucleotide with phosphorothioate linkage
  modified_base 58: mod_base = OTHER; note = 2'-O-methyl modified nucleotide with phosphorothioate linkage
  modified_base 60: mod_base = OTHER; note = 2'-fluoro modified nucleotide
  modified_base 67: mod_base = OTHER; note = 2'-fluoro modified nucleotide
  modified_base 69: mod_base = OTHER; note = 2'-fluoro modified nucleotide
  modified_base 73: mod_base = OTHER; note = Nucleotide with phosphorothioate linkage
  modified_base 74: mod_base = OTHER; note = 2'-O-methyl modified nucleotide

SEQ ID NO: 959 - RNA, 75 nt, synthetic construct; identical to SEQ ID NO: 897
  source 1..75: mol_type = other RNA
  modified_base 1: mod_base = OTHER; note = 2'-O-methyl modified nucleotide with phosphorothioate linkage attached to cyanine3 dye
  modified_base 2: mod_base = OTHER; note = 2'-fluoro modified nucleotide
  modified_base 19: mod_base = OTHER; note = Nucleotide with phosphorothioate linkage attached to N-acetylgalactosamine
  modified_base 20: mod_base = OTHER; note = 2'-fluoro modified nucleotide
  modified_base 23: mod_base = OTHER; note = Nucleotide with phosphorothioate linkage
  modified_base 24: mod_base = OTHER; note = 2'-fluoro modified nucleotide
  modified_base 28: mod_base = OTHER; note = 2'-fluoro modified nucleotide
  modified_base 38: mod_base = OTHER; note = Nucleotide with phosphorothioate linkage
  modified_base 39: mod_base = OTHER; note = 2'-fluoro modified nucleotide
  modified_base 51: mod_base = OTHER; note = Nucleotide with phosphorothioate linkage
  modified_base 60: mod_base = OTHER; note = 2'-fluoro modified nucleotide
  modified_base 65: mod_base = OTHER; note = Nucleotide with phosphorothioate linkage
  modified_base 73: mod_base = OTHER; note = Nucleotide with phosphorothioate linkage
  modified_base 74: mod_base = OTHER; note = 2'-O-methyl modified nucleotide

SEQ ID NO: 960 - RNA, 75 nt, synthetic construct; identical to SEQ ID NO: 897
  source 1..75: mol_type = other RNA
  modified_base 1: mod_base = OTHER; note = 2'-O-methyl modified nucleotide with phosphorothioate linkage attached to cyanine3 dye
  modified_base 2: mod_base = OTHER; note = 2'-O-methyl modified nucleotide
  modified_base 13: mod_base = OTHER; note = Nucleotide with phosphorothioate linkage
  modified_base 14: mod_base = OTHER; note = 2'-fluoro modified nucleotide
  modified_base 19: mod_base = OTHER; note = Nucleotide attached to N-acetylgalactosamine
  modified_base 22: mod_base = OTHER; note = 2'-fluoro modified nucleotide
  modified_base 23: mod_base = OTHER; note = 2'-fluoro modified nucleotide
  modified_base 27: mod_base = OTHER; note = 2'-fluoro modified nucleotide with phosphorothioate linkage
  modified_base 40: mod_base = OTHER; note = 2'-O-methyl modified nucleotide with phosphorothioate linkage
  modified_base 41: mod_base = OTHER; note = 2'-fluoro modified nucleotide
  modified_base 44: mod_base = OTHER; note = 2'-fluoro modified nucleotide
  modified_base 55: mod_base = OTHER; note = Nucleotide with phosphorothioate linkage
  modified_base 73: mod_base = OTHER; note = Nucleotide with phosphorothioate linkage
  modified_base 74: mod_base = OTHER; note = Nucleotide with phosphorothioate linkage

SEQ ID NO: 961 - RNA, 75 nt, synthetic construct; identical to SEQ ID NO: 897
  source 1..75: mol_type = other RNA
  modified_base 1: mod_base = OTHER; note = 2'-O-methyl modified nucleotide with phosphorothioate linkage attached to cyanine3 dye
  modified_base 2: mod_base = OTHER; note = 2'-O-methyl modified nucleotide
  modified_base 12: mod_base = OTHER; note = 2'-O-methyl modified nucleotide
  modified_base 13: mod_base = OTHER; note = Nucleotide with phosphorothioate linkage
  modified_base 19: mod_base = OTHER; note = Nucleotide attached to N-acetylgalactosamine
  modified_base 22: mod_base = OTHER; note = 2'-fluoro modified nucleotide
  modified_base 23: mod_base = OTHER; note = 2'-fluoro modified nucleotide
  modified_base 27: mod_base = OTHER; note = Nucleotide with phosphorothioate linkage
  modified_base 28: mod_base = OTHER; note = 2'-fluoro modified nucleotide
  modified_base 40: mod_base = OTHER; note = Nucleotide with phosphorothioate linkage
  modified_base 41: mod_base = OTHER; note = 2'-fluoro modified nucleotide
  modified_base 46: mod_base = OTHER; note = 2'-fluoro modified nucleotide
  modified_base 55: mod_base = OTHER; note = 2'-O-methyl modified nucleotide
  modified_base 63: mod_base = OTHER; note = Nucleotide with phosphorothioate linkage
  modified_base 64: mod_base = OTHER; note = Nucleotide with phosphorothioate linkage
  modified_base 67: mod_base = OTHER; note = 2'-fluoro modified nucleotide
  modified_base 73: mod_base = OTHER; note = Nucleotide with phosphorothioate linkage
  modified_base 74: mod_base = OTHER; note = 2'-O-methyl modified nucleotide

SEQ ID NO: 962 - RNA, 75 nt, synthetic construct; identical to SEQ ID NO: 897
  source 1..75: mol_type = other RNA
  modified_base 1: mod_base = OTHER; note = 2'-O-methyl modified nucleotide with phosphorothioate linkage attached to cyanine3 dye
  modified_base 2: mod_base = OTHER; note = 2'-fluoro modified nucleotide with phosphorothioate linkage
  modified_base 18: mod_base = OTHER; note = 2'-fluoro modified nucleotide
  modified_base 19: mod_base = OTHER; note = 2'-fluoro modified nucleotide attached to N-acetylgalactosamine
  modified_base 20: mod_base = OTHER; note = 2'-fluoro modified nucleotide
  modified_base 23: mod_base = OTHER; note = Nucleotide with phosphorothioate linkage
  modified_base 24: mod_base = OTHER; note = 2'-fluoro modified nucleotide with phosphorothioate linkage
  modified_base 25: mod_base = OTHER; note = Nucleotide with phosphorothioate linkage
  modified_base 27: mod_base = OTHER; note = 2'-fluoro modified nucleotide
  modified_base 31: mod_base = OTHER; note = 2'-fluoro modified nucleotide
  modified_base 34: mod_base = OTHER; note = 2'-fluoro modified nucleotide
  modified_base 44: mod_base = OTHER; note = 2'-fluoro modified nucleotide
  modified_base 48: mod_base = OTHER; note = 2'-fluoro modified nucleotide with phosphorothioate linkage
  modified_base 63: mod_base = OTHER; note = 2'-fluoro modified nucleotide with phosphorothioate linkage
  modified_base 67: mod_base = OTHER; note = 2'-fluoro modified nucleotide
  modified_base 71: mod_base = OTHER; note = 2'-fluoro modified nucleotide
  modified_base 75: mod_base = OTHER; note = 2'-O-methyl modified nucleotide

SEQ ID NO: 963 - RNA, 75 nt, synthetic construct; identical to SEQ ID NO: 897
  source 1..75: mol_type = other RNA
  modified_base 1: mod_base = OTHER; note = 2'-O-methyl modified nucleotide with phosphorothioate linkage attached to cyanine3 dye
  modified_base 13: mod_base = OTHER; note = 2'-fluoro modified nucleotide with phosphorothioate linkage
  modified_base 19: mod_base = OTHER; note = Nucleotide with phosphorothioate linkage attached to N-acetylgalactosamine
  modified_base 20: mod_base = OTHER; note = 2'-fluoro modified nucleotide
  modified_base 28: mod_base = OTHER; note = 2'-fluoro modified nucleotide
  modified_base 40: mod_base = OTHER; note = 2'-fluoro modified nucleotide
  modified_base 42: mod_base = OTHER; note = 2'-fluoro modified nucleotide
  modified_base 52: mod_base = OTHER; note = 2'-fluoro modified nucleotide with phosphorothioate linkage
  modified_base 67: mod_base = OTHER; note = 2'-fluoro modified nucleotide
  modified_base 74: mod_base = OTHER; note = Nucleotide with phosphorothioate linkage
  modified_base 75: mod_base = OTHER; note = 2'-fluoro modified nucleotide

SEQ ID NO: 964 - RNA, 75 nt, synthetic construct; identical to SEQ ID NO: 897
  source 1..75: mol_type = other RNA
  modified_base 1: mod_base = OTHER; note = 2'-O-methyl modified nucleotide with phosphorothioate linkage attached to cyanine3 dye
  modified_base 4: mod_base = OTHER; note = 2'-fluoro modified nucleotide with phosphorothioate linkage
  modified_base 19: mod_base = OTHER; note = Nucleotide attached to N-acetylgalactosamine
  modified_base 28: mod_base = OTHER; note = 2'-O-methyl modified nucleotide
  modified_base 43: mod_base = OTHER; note = 2'-fluoro modified nucleotide
  modified_base 46: mod_base = OTHER; note = 2'-fluoro modified nucleotide
  modified_base 55: mod_base = OTHER; note = 2'-fluoro modified nucleotide
  modified_base 60: mod_base = OTHER; note = 2'-fluoro modified nucleotide
  modified_base 61: mod_base = OTHER; note = 2'-fluoro modified nucleotide
  modified_base 73: mod_base = OTHER; note = 2'-fluoro modified nucleotide with phosphorothioate linkage

SEQ ID NO: 965 - RNA, 75 nt, synthetic construct; identical to SEQ ID NO: 897
  source 1..75: mol_type = other RNA
  modified_base 1: mod_base = OTHER; note = 2'-fluoro modified nucleotide with phosphorothioate linkage attached to cyanine3 dye
  modified_base 2: mod_base = OTHER; note = 2'-O-methyl modified nucleotide with phosphorothioate linkage
  modified_base 12: mod_base = OTHER; note = 2'-O-methyl modified nucleotide
  modified_base 13: mod_base = OTHER; note = Nucleotide with phosphorothioate linkage
  modified_base 16: mod_base = OTHER; note = 2'-fluoro modified nucleotide
  modified_base 19: mod_base = OTHER; note = Nucleotide attached to N-acetylgalactosamine
  modified_base 22: mod_base = OTHER; note = 2'-fluoro modified nucleotide
  modified_base 23: mod_base = OTHER; note = 2'-fluoro modified nucleotide
  modified_base 28: mod_base = OTHER; note = 2'-fluoro modified nucleotide
  modified_base 29: mod_base = OTHER; note = 2'-O-methyl modified nucleotide
  modified_base 44: mod_base = OTHER; note = 2'-fluoro modified nucleotide
  modified_base 53: mod_base = OTHER; note = 2'-fluoro modified nucleotide with phosphorothioate linkage
  modified_base 65: mod_base = OTHER; note = Nucleotide with phosphorothioate linkage
  modified_base 66: mod_base = OTHER; note = Nucleotide with phosphorothioate linkage
  modified_base 67: mod_base = OTHER; note = 2'-fluoro modified nucleotide
  modified_base 73: mod_base = OTHER; note = Nucleotide with phosphorothioate linkage
  modified_base 74: mod_base = OTHER; note = 2'-O-methyl modified nucleotide
  modified_base 75: mod_base = OTHER; note = 2'-fluoro modified nucleotide

SEQ ID NO: 966 - RNA, 75 nt, synthetic construct; identical to SEQ ID NO: 897
  source 1..75: mol_type = other RNA
  modified_base 1: mod_base = OTHER; note = 2'-O-methyl modified nucleotide with phosphorothioate linkage attached to cyanine3 dye
  modified_base 2: mod_base = OTHER; note = 2'-O-methyl modified nucleotide with phosphorothioate linkage
  modified_base 12: mod_base = OTHER; note = Nucleotide with phosphorothioate linkage
  modified_base 19: mod_base = OTHER; note = 2'-fluoro modified nucleotide attached to N-acetylgalactosamine
  modified_base 22: mod_base = OTHER; note = 2'-fluoro modified nucleotide
  modified_base 23: mod_base = OTHER; note = 2'-fluoro modified nucleotide
  modified_base 31: mod_base = OTHER; note = 2'-O-methyl modified nucleotide
  modified_base 50: mod_base = OTHER; note = Nucleotide with phosphorothioate linkage
  modified_base 51: mod_base = OTHER; note = 2'-fluoro modified nucleotide
  modified_base 63: mod_base = OTHER; note = Nucleotide with phosphorothioate linkage
  modified_base 66: mod_base = OTHER; note = 2'-fluoro modified nucleotide
  modified_base 73: mod_base = OTHER; note = Nucleotide with phosphorothioate linkage
  modified_base 74: mod_base = OTHER; note = 2'-O-methyl modified nucleotide

SEQ ID NO: 967 - RNA, 75 nt, synthetic construct; identical to SEQ ID NO: 897
  source 1..75: mol_type = other RNA
  modified_base 1: mod_base = OTHER; note = 2'-O-methyl modified nucleotide with phosphorothioate linkage attached to cyanine3 dye
  modified_base 2: mod_base = OTHER; note = 2'-O-methyl modified nucleotide with phosphorothioate linkage
  modified_base 14: mod_base = OTHER; note = 2'-fluoro modified nucleotide
  modified_base 16: mod_base = OTHER; note = 2'-fluoro modified nucleotide
  modified_base 22: mod_base = OTHER; note = 2'-fluoro modified nucleotide
  modified_base 24: mod_base = OTHER; note = 2'-fluoro modified nucleotide
  modified_base 40: mod_base = OTHER; note = Nucleotide with phosphorothioate linkage
  modified_base 43: mod_base = OTHER; note = 2'-fluoro modified nucleotide
  modified_base 44: mod_base = OTHER; note = 2'-fluoro modified nucleotide
  modified_base 45: mod_base = OTHER; note = 2'-fluoro modified nucleotide with phosphorothioate linkage
  modified_base 47: mod_base = OTHER; note = Nucleotide attached to N-acetylgalactosamine
  modified_base 51: mod_base = OTHER; note = 2'-fluoro modified nucleotide
  modified_base 60: mod_base = OTHER; note = 2'-fluoro modified nucleotide
  modified_base 73: mod_base = OTHER; note = Nucleotide with phosphorothioate linkage

SEQ ID NO: 968 - RNA, 75 nt, synthetic construct; identical to SEQ ID NO: 897
  source 1..75: mol_type = other RNA
  modified_base 1: mod_base = OTHER; note = 2'-O-methyl modified nucleotide with phosphorothioate linkage attached to cyanine3 dye
  modified_base 2: mod_base = OTHER; note = 2'-O-methyl modified nucleotide with phosphorothioate linkage
  modified_base 12: mod_base = OTHER; note = Nucleotide with phosphorothioate linkage
  modified_base 13: mod_base = OTHER; note = 2'-fluoro modified nucleotide with phosphorothioate linkage
  modified_base 23: mod_base = OTHER; note = Nucleotide with phosphorothioate linkage
  modified_base 24: mod_base = OTHER; note = 2'-fluoro modified nucleotide
  modified_base 43: mod_base = OTHER; note = 2'-fluoro modified nucleotide
  modified_base 47: mod_base = OTHER; note = Nucleotide attached to N-acetylgalactosamine
  modified_base 51: mod_base = OTHER; note = Nucleotide with phosphorothioate linkage
  modified_base 58: mod_base = OTHER; note = 2'-O-methyl modified nucleotide with phosphorothioate linkage
  modified_base 60: mod_base = OTHER; note = 2'-fluoro modified nucleotide
  modified_base 67: mod_base = OTHER; note = 2'-fluoro modified nucleotide
  modified_base 69: mod_base = OTHER; note = 2'-fluoro modified nucleotide
  modified_base 73: mod_base = OTHER; note = Nucleotide with phosphorothioate linkage
  modified_base 74: mod_base = OTHER; note = 2'-O-methyl modified nucleotide

SEQ ID NO: 969 - RNA, 75 nt, synthetic construct; identical to SEQ ID NO: 897
  source 1..75: mol_type = other RNA
  modified_base 1: mod_base = OTHER; note = 2'-O-methyl modified nucleotide with phosphorothioate linkage attached to cyanine3 dye
  modified_base 2: mod_base = OTHER; note = 2'-fluoro modified nucleotide
  modified_base 19: mod_base = OTHER; note = Nucleotide with phosphorothioate linkage
  modified_base 20: mod_base = OTHER; note = 2'-fluoro modified nucleotide
  modified_base 23: mod_base = OTHER; note = Nucleotide with phosphorothioate linkage
  modified_base 24: mod_base = OTHER; note = 2'-fluoro modified nucleotide
  modified_base 28: mod_base = OTHER; note = 2'-fluoro modified nucleotide
  modified_base 38: mod_base = OTHER; note = Nucleotide with phosphorothioate linkage
  modified_base 39: mod_base = OTHER; note = 2'-fluoro modified nucleotide
  modified_base 47: mod_base = OTHER; note = Nucleotide attached to N-acetylgalactosamine
  modified_base 51: mod_base = OTHER; note = Nucleotide with phosphorothioate linkage
  modified_base 60: mod_base = OTHER; note = 2'-fluoro modified nucleotide
  modified_base 65: mod_base = OTHER; note = Nucleotide with phosphorothioate linkage
  modified_base 73: mod_base = OTHER; note = Nucleotide with phosphorothioate linkage
  modified_base 74: mod_base = OTHER; note = 2'-O-methyl modified nucleotide

SEQ ID NO: 970 - RNA, 75 nt, synthetic construct; identical to SEQ ID NO: 897
  source 1..75: mol_type = other RNA
  modified_base 1: mod_base = OTHER; note = 2'-O-methyl modified nucleotide with phosphorothioate linkage attached to cyanine3 dye
  modified_base 2: mod_base = OTHER; note = 2'-O-methyl modified nucleotide
  modified_base 13: mod_base = OTHER; note = Nucleotide with phosphorothioate linkage
  modified_base 14: mod_base = OTHER; note = 2'-fluoro modified nucleotide
  modified_base 22: mod_base = OTHER; note = 2'-fluoro modified nucleotide
  modified_base 23: mod_base = OTHER; note = 2'-fluoro modified nucleotide
  modified_base 27: mod_base = OTHER; note = 2'-fluoro modified nucleotide with phosphorothioate linkage
  modified_base 40: mod_base = OTHER; note = 2'-O-methyl modified nucleotide with phosphorothioate linkage
  modified_base 41: mod_base = OTHER; note = 2'-fluoro modified nucleotide
  modified_base 44: mod_base = OTHER; note = 2'-fluoro modified nucleotide
  modified_base 47: mod_base = OTHER; note = Nucleotide attached to N-acetylgalactosamine
  modified_base 55: mod_base = OTHER; note = Nucleotide with phosphorothioate linkage
  modified_base 73: mod_base = OTHER; note = Nucleotide with phosphorothioate linkage
  modified_base 74: mod_base = OTHER; note = Nucleotide with phosphorothioate linkage

SEQ ID NO: 971 - RNA, 75 nt, synthetic construct; identical to SEQ ID NO: 897
  source 1..75: mol_type = other RNA
  modified_base 1: mod_base = OTHER; note = 2'-O-methyl modified nucleotide with phosphorothioate linkage attached to cyanine3 dye
  modified_base 2: mod_base = OTHER; note = 2'-O-methyl modified nucleotide
  modified_base 12: mod_base = OTHER; note = 2'-O-methyl modified nucleotide
  modified_base 13: mod_base = OTHER; note = Nucleotide with phosphorothioate linkage
  modified_base 22: mod_base = OTHER; note = 2'-fluoro modified nucleotide
  modified_base 23: mod_base = OTHER; note = 2'-fluoro modified nucleotide
  modified_base 27: mod_base = OTHER; note = Nucleotide with phosphorothioate linkage
  modified_base 28: mod_base = OTHER; note = 2'-fluoro modified nucleotide
  modified_base 40: mod_base = OTHER; note = Nucleotide with phosphorothioate linkage
  modified_base 41: mod_base = OTHER; note = 2'-fluoro modified nucleotide
  modified_base 46: mod_base = OTHER; note = 2'-fluoro modified nucleotide
  modified_base 47: mod_base = OTHER; note = Nucleotide attached to N-acetylgalactosamine
  modified_base 55: mod_base = OTHER; note = 2'-O-methyl modified nucleotide
  modified_base 63: mod_base = OTHER; note = Nucleotide with phosphorothioate linkage
  modified_base 64: mod_base = OTHER; note = Nucleotide with phosphorothioate linkage
  modified_base 67: mod_base = OTHER; note = 2'-fluoro modified nucleotide
  modified_base 73: mod_base = OTHER; note = Nucleotide with phosphorothioate linkage
  modified_base 74: mod_base = OTHER; note = 2'-O-methyl modified nucleotide

SEQ ID NO: 972 - RNA, 75 nt, synthetic construct; identical to SEQ ID NO: 897
  source 1..75: mol_type = other RNA
  modified_base 1: mod_base = OTHER; note = 2'-O-methyl modified nucleotide with phosphorothioate linkage attached to cyanine3 dye
  modified_base 2: mod_base = OTHER; note = 2'-fluoro modified nucleotide with phosphorothioate linkage
  modified_base 18: mod_base = OTHER; note = 2'-fluoro modified nucleotide
  modified_base 19: mod_base = OTHER; note = 2'-fluoro modified nucleotide
  modified_base 20: mod_base = OTHER; note = 2'-fluoro modified nucleotide
  modified_base 23: mod_base = OTHER; note = Nucleotide with phosphorothioate linkage
  modified_base 24: mod_base = OTHER; note = 2'-fluoro modified nucleotide with phosphorothioate linkage
  modified_base 25: mod_base = OTHER; note = Nucleotide with phosphorothioate linkage
  modified_base 27: mod_base = OTHER; note = 2'-fluoro modified nucleotide
  modified_base 31: mod_base = OTHER; note = 2'-fluoro modified nucleotide
  modified_base 34: mod_base = OTHER; note = 2'-fluoro modified nucleotide
  modified_base 44: mod_base = OTHER; note = 2'-fluoro modified nucleotide
  modified_base 47: mod_base = OTHER; note = Nucleotide attached to N-acetylgalactosamine
  modified_base 48: mod_base = OTHER; note = 2'-fluoro modified nucleotide with phosphorothioate linkage
  modified_base 63: mod_base = OTHER; note = 2'-fluoro modified nucleotide with phosphorothioate linkage
  modified_base 67: mod_base = OTHER; note = 2'-fluoro modified nucleotide
  modified_base 71: mod_base = OTHER; note = 2'-fluoro modified nucleotide
  modified_base 75: mod_base = OTHER; note = 2'-O-methyl modified nucleotide

SEQ ID NO: 973 - RNA, 75 nt, synthetic construct; identical to SEQ ID NO: 897
  source 1..75: mol_type = other RNA
  modified_base 1: mod_base = OTHER; note = 2'-O-methyl modified nucleotide with phosphorothioate linkage attached to cyanine3 dye
  modified_base 13: mod_base = OTHER; note = 2'-fluoro modified nucleotide with phosphorothioate linkage
  modified_base 19: mod_base = OTHER; note = Nucleotide with phosphorothioate linkage
  modified_base 20: mod_base = OTHER; note = 2'-fluoro modified nucleotide
  modified_base 28: mod_base = OTHER; note = 2'-fluoro modified nucleotide
  modified_base 40: mod_base = OTHER; note = 2'-fluoro modified nucleotide
  modified_base 42: mod_base = OTHER; note = 2'-fluoro modified nucleotide
  modified_base 47: mod_base = OTHER; note = Nucleotide attached to N-acetylgalactosamine
  modified_base 52: mod_base = OTHER; note = 2'-fluoro modified nucleotide with phosphorothioate linkage
  modified_base 67: mod_base = OTHER; note = 2'-fluoro modified nucleotide
  modified_base 74: mod_base = OTHER; note = Nucleotide with phosphorothioate linkage
  modified_base 75: mod_base = OTHER; note = 2'-fluoro modified nucleotide

SEQ ID NO: 974 - RNA, 75 nt, synthetic construct; identical to SEQ ID NO: 897
  source 1..75: mol_type = other RNA
  modified_base 1: mod_base = OTHER; note = 2'-O-methyl modified nucleotide with phosphorothioate linkage attached to cyanine3 dye
  modified_base 4: mod_base = OTHER; note = 2'-fluoro modified nucleotide with phosphorothioate linkage
  modified_base 28: mod_base = OTHER; note = 2'-O-methyl modified nucleotide
  modified_base 43: mod_base = OTHER; note = 2'-fluoro modified nucleotide
  modified_base 46: mod_base = OTHER; note = 2'-fluoro modified nucleotide
  modified_base 47: mod_base = OTHER; note = Nucleotide attached to N-acetylgalactosamine
  modified_base 55: mod_base = OTHER; note = 2'-fluoro modified nucleotide
  modified_base 60: mod_base = OTHER; note = 2'-fluoro modified nucleotide
  modified_base 61: mod_base = OTHER; note = 2'-fluoro modified nucleotide
  modified_base 73: mod_base = OTHER; note = 2'-fluoro modified nucleotide with phosphorothioate linkage

SEQ ID NO: 975 - RNA, 75 nt, synthetic construct; identical to SEQ ID NO: 897
  source 1..75: mol_type = other RNA
  modified_base 1: mod_base = OTHER; note = 2'-fluoro modified nucleotide with phosphorothioate linkage attached to cyanine3 dye
  modified_base 2: mod_base = OTHER; note = 2'-O-methyl modified nucleotide with phosphorothioate linkage
  modified_base 12: mod_base = OTHER; note = 2'-O-methyl modified nucleotide
  modified_base 13: mod_base = OTHER; note = Nucleotide with phosphorothioate linkage
  modified_base 16: mod_base = OTHER; note = 2'-fluoro modified nucleotide
  modified_base 22: mod_base = OTHER; note = 2'-fluoro modified nucleotide
  modified_base 23: mod_base = OTHER; note = 2'-fluoro modified nucleotide
  modified_base 28: mod_base = OTHER; note = 2'-fluoro modified nucleotide
  modified_base 29: mod_base = OTHER; note = 2'-O-methyl modified nucleotide
  modified_base 44: mod_base = OTHER; note = 2'-fluoro modified nucleotide
  modified_base 47: mod_base = OTHER; note = Nucleotide attached to N-acetylgalactosamine
  modified_base 53: mod_base = OTHER; note = 2'-fluoro modified nucleotide with phosphorothioate linkage
  modified_base 65: mod_base = OTHER; note = Nucleotide with phosphorothioate linkage
  modified_base 66: mod_base = OTHER; note = Nucleotide with phosphorothioate linkage
  modified_base 67: mod_base = OTHER; note = 2'-fluoro modified nucleotide
  modified_base 73: mod_base = OTHER; note = Nucleotide with phosphorothioate linkage
  modified_base 74: mod_base = OTHER; note = 2'-O-methyl modified nucleotide
  modified_base 75: mod_base = OTHER; note = 2'-fluoro modified nucleotide

SEQ ID NO: 976 - RNA, 75 nt, synthetic construct; identical to SEQ ID NO: 897
  source 1..75: mol_type = other RNA
  modified_base 1: mod_base = OTHER; note = 2'-O-methyl modified nucleotide with phosphorothioate linkage attached to cyanine3 dye
  modified_base 2: mod_base = OTHER; note = 2'-O-methyl modified nucleotide with phosphorothioate linkage
  modified_base 12: mod_base = OTHER; note = Nucleotide with phosphorothioate linkage
  modified_base 19: mod_base = OTHER; note = 2'-fluoro modified nucleotide
  modified_base 22: mod_base = OTHER; note = 2'-fluoro modified nucleotide
  modified_base 23: mod_base = OTHER; note = 2'-fluoro modified nucleotide
  modified_base 31: mod_base = OTHER; note = 2'-O-methyl modified nucleotide
  modified_base 47: mod_base = OTHER; note = Nucleotide attached to N-acetylgalactosamine
  modified_base 50: mod_base = OTHER; note = Nucleotide with phosphorothioate linkage
  modified_base 51: mod_base = OTHER; note = 2'-fluoro modified nucleotide
  modified_base 63: mod_base = OTHER; note = Nucleotide with phosphorothioate linkage
  modified_base 66: mod_base = OTHER; note = 2'-fluoro modified nucleotide
  modified_base 73: mod_base = OTHER; note = Nucleotide with phosphorothioate linkage
  modified_base 74: mod_base = OTHER; note = 2'-O-methyl modified nucleotide

SEQ ID NO: 977 - RNA, 75 nt, synthetic construct; identical to SEQ ID NO: 897
  source 1..75: mol_type = other RNA
  modified_base 1: mod_base = OTHER; note = 2'-O-methyl modified nucleotide with phosphorothioate linkage
  modified_base 2: mod_base = OTHER; note = 2'-O-methyl modified nucleotide with phosphorothioate linkage
  modified_base 14: mod_base = OTHER; note = 2'-fluoro modified nucleotide
  modified_base 16: mod_base = OTHER; note = 2'-fluoro modified Nucleotide attached to AN1 (C6-U phosphoramidite (5'-Dimethoxytrityl-5-[N-(trifluoroacetylaminohexyl)-3-acry limido]-Uridine, 2'-O-triisopropylsilyloxymethyl-3'-[(2-cyanoethyl)-(N,N-dii sopropyl)]-phosphoramidite))
  modified_base 22: mod_base = OTHER; note = 2'-fluoro modified nucleotide
  modified_base 24: mod_base = OTHER; note = 2'-fluoro modified nucleotide
  modified_base 40: mod_base = OTHER; note = Nucleotide with phosphorothioate linkage
  modified_base 43: mod_base = OTHER; note = 2'-fluoro modified nucleotide
  modified_base 44: mod_base = OTHER; note = 2'-fluoro modified nucleotide
  modified_base 45: mod_base = OTHER; note = 2'-fluoro modified nucleotide with phosphorothioate linkage
  modified_base 51: mod_base = OTHER; note = 2'-fluoro modified nucleotide
  modified_base 60: mod_base = OTHER; note = 2'-fluoro modified nucleotide
  modified_base 73: mod_base = OTHER; note = Nucleotide with phosphorothioate linkage

SEQ ID NO: 978 - RNA, 75 nt, synthetic construct; identical to SEQ ID NO: 897
  source 1..75: mol_type = other RNA
  modified_base 1: mod_base = OTHER; note = 2'-O-methyl modified nucleotide with phosphorothioate linkage
  modified_base 2: mod_base = OTHER; note = 2'-O-methyl modified nucleotide with phosphorothioate linkage
  modified_base 12: mod_base = OTHER; note = Nucleotide with phosphorothioate linkage
  modified_base 13: mod_base = OTHER; note = 2'-fluoro modified nucleotide with phosphorothioate linkage
  modified_base 16: mod_base = OTHER; note = Nucleotide attached to AN1 (C6-U phosphoramidite (5'-Dimethoxytrityl-5-[N-(trifluoroacetylaminohexyl)-3-acry limido]-Uridine, 2'-O-triisopropylsilyloxymethyl-3'-[(2-cyanoethyl)-(N,N-dii sopropyl)]-phosphoramidite))
  modified_base 23: mod_base = OTHER; note = Nucleotide with phosphorothioate linkage
  modified_base 24: mod_base = OTHER; note = 2'-fluoro modified nucleotide
  modified_base 43: mod_base = OTHER; note = 2'-fluoro modified nucleotide
  modified_base 51: mod_base = OTHER; note = Nucleotide with phosphorothioate linkage
  modified_base 58: mod_base = OTHER; note = 2'-O-methyl modified nucleotide with phosphorothioate linkage
  modified_base 60: mod_base = OTHER; note = 2'-fluoro modified nucleotide
  modified_base 67: mod_base = OTHER; note = 2'-fluoro modified nucleotide
  modified_base 69: mod_base = OTHER; note = 2'-fluoro modified nucleotide
  modified_base 73: mod_base = OTHER; note = Nucleotide with phosphorothioate linkage
  modified_base 74: mod_base = OTHER; note = 2'-O-methyl modified nucleotide

SEQ ID NO: 979 - RNA, 75 nt, synthetic construct; identical to SEQ ID NO: 897
  source 1..75: mol_type = other RNA
  modified_base 1: mod_base = OTHER; note = 2'-O-methyl modified nucleotide with phosphorothioate linkage
  modified_base 2: mod_base = OTHER; note = 2'-fluoro modified nucleotide
  modified_base 16: mod_base = OTHER; note = Nucleotide attached to AN1 (C6-U phosphoramidite (5'-Dimethoxytrityl-5-[N-(trifluoroacetylaminohexyl)-3-acry limido]-Uridine, 2'-O-triisopropylsilyloxymethyl-3'-[(2-cyanoethyl)-(N,N-dii sopropyl)]-phosphoramidite))
  modified_base 19: mod_base = OTHER; note = Nucleotide with phosphorothioate linkage
  modified_base 20: mod_base = OTHER; note = 2'-fluoro modified nucleotide
  modified_base 23: mod_base = OTHER; note = Nucleotide with phosphorothioate linkage
  modified_base 24: mod_base = OTHER; note = 2'-fluoro modified nucleotide
  modified_base 28: mod_base = OTHER; note = 2'-fluoro modified nucleotide
  modified_base 38: mod_base = OTHER; note = Nucleotide with phosphorothioate linkage
  modified_base 39: mod_base = OTHER; note = 2'-fluoro modified nucleotide
  modified_base 51: mod_base = OTHER; note = Nucleotide with phosphorothioate linkage
  modified_base 60: mod_base = OTHER; note = 2'-fluoro modified nucleotide
  modified_base 65: mod_base = OTHER; note = Nucleotide with phosphorothioate linkage
  modified_base 73: mod_base = OTHER; note = Nucleotide with phosphorothioate linkage
  modified_base 74: mod_base = OTHER; note = 2'-O-methyl modified nucleotide

SEQ ID NO: 980 - RNA, 75 nt, synthetic construct; identical to SEQ ID NO: 897
  source 1..75: mol_type = other RNA
  modified_base 1: mod_base = OTHER; note = 2'-O-methyl modified nucleotide with phosphorothioate linkage
  modified_base 2: mod_base = OTHER; note = 2'-O-methyl modified nucleotide
  modified_base 13: mod_base = OTHER; note = Nucleotide with phosphorothioate linkage
  modified_base 14: mod_base = OTHER; note = 2'-fluoro modified nucleotide
  modified_base 16: mod_base = OTHER; note = Nucleotide attached to AN1 (C6-U phosphoramidite (5'-Dimethoxytrityl-5-[N-(trifluoroacetylaminohexyl)-3-acry limido]-Uridine, 2'-O-triisopropylsilyloxymethyl-3'-[(2-cyanoethyl)-(N,N-dii sopropyl)]-phosphoramidite))
  modified_base 22: mod_base = OTHER; note = 2'-fluoro modified nucleotide
  modified_base 23: mod_base = OTHER; note = 2'-fluoro modified nucleotide
  modified_base 27: mod_base = OTHER; note = 2'-fluoro modified nucleotide with phosphorothioate linkage
  modified_base 40: mod_base = OTHER; note = 2'-O-methyl modified nucleotide with phosphorothioate linkage
  modified_base 41: mod_base = OTHER; note = 2'-fluoro modified nucleotide
  modified_base 44: mod_base = OTHER; note = 2'-fluoro modified nucleotide
  modified_base 55: mod_base = OTHER; note = Nucleotide with phosphorothioate linkage
  modified_base 73: mod_base = OTHER; note = Nucleotide with phosphorothioate linkage
  modified_base 74: mod_base = OTHER; note = Nucleotide with phosphorothioate linkage

SEQ ID NO: 981 - RNA, 75 nt, synthetic construct; identical to SEQ ID NO: 897
  source 1..75: mol_type = other RNA
  modified_base 1: mod_base = OTHER; note = 2'-O-methyl modified nucleotide with phosphorothioate linkage
  modified_base 2: mod_base = OTHER; note = 2'-O-methyl modified nucleotide
  modified_base 12: mod_base = OTHER; note = 2'-O-methyl modified nucleotide
  modified_base 13: mod_base = OTHER; note = Nucleotide with phosphorothioate linkage
  modified_base 16: mod_base = OTHER; note = Nucleotide attached to AN1 (C6-U phosphoramidite (5'-Dimethoxytrityl-5-[N-(trifluoroacetylaminohexyl)-3-acry limido]-Uridine, 2'-O-triisopropylsilyloxymethyl-3'-[(2-cyanoethyl)-(N,N-dii sopropyl)]-phosphoramidite))
  modified_base 22: mod_base = OTHER; note = 2'-fluoro modified nucleotide
  modified_base 23: mod_base = OTHER; note = 2'-fluoro modified nucleotide
  modified_base 27: mod_base = OTHER; note = Nucleotide with phosphorothioate linkage
  modified_base 28: mod_base = OTHER; note = 2'-fluoro modified nucleotide
  modified_base 40: mod_base = OTHER; note = Nucleotide with phosphorothioate linkage
  modified_base 41: mod_base = OTHER; note = 2'-fluoro modified nucleotide
  modified_base 46: mod_base = OTHER; note = 2'-fluoro modified nucleotide
  modified_base 55: mod_base = OTHER; note = 2'-O-methyl modified nucleotide
  modified_base 63: mod_base = OTHER; note = Nucleotide with phosphorothioate linkage
  modified_base 64: mod_base = OTHER; note = Nucleotide with phosphorothioate linkage
  modified_base 67: mod_base = OTHER; note = 2'-fluoro modified nucleotide
  modified_base 73: mod_base = OTHER; note = Nucleotide with phosphorothioate linkage
  modified_base 74: mod_base = OTHER; note = 2'-O-methyl modified nucleotide

SEQ ID NO: 982 - RNA, 75 nt, synthetic construct; identical to SEQ ID NO: 897
  source 1..75: mol_type = other RNA
  modified_base 1: mod_base = OTHER; note = 2'-O-methyl modified nucleotide with phosphorothioate linkage
  modified_base 2: mod_base = OTHER; note = 2'-fluoro modified nucleotide with phosphorothioate linkage
  modified_base 16: mod_base = OTHER; note = Nucleotide attached to AN1 (C6-U phosphoramidite (5'-Dimethoxytrityl-5-[N-(trifluoroacetylaminohexyl)-3-acry limido]-Uridine, 2'-O-triisopropylsilyloxymethyl-3'-[(2-cyanoethyl)-(N,N-dii sopropyl)]-phosphoramidite))
  modified_base 18: mod_base = OTHER; note = 2'-fluoro modified nucleotide
  modified_base 19: mod_base = OTHER; note = 2'-fluoro modified nucleotide
  modified_base 20: mod_base = OTHER; note = 2'-fluoro modified nucleotide
  modified_base 23: mod_base = OTHER; note = Nucleotide with phosphorothioate linkage
  modified_base 24: mod_base = OTHER; note = 2'-fluoro modified nucleotide with phosphorothioate linkage
  modified_base 25: mod_base = OTHER; note = Nucleotide with phosphorothioate linkage
  modified_base 27: mod_base = OTHER; note = 2'-fluoro modified nucleotide
  modified_base 31: mod_base = OTHER; note = 2'-fluoro modified nucleotide
  modified_base 34: mod_base = OTHER; note = 2'-fluoro modified nucleotide
  modified_base 44: mod_base = OTHER; note = 2'-fluoro modified nucleotide
  modified_base 48: mod_base = OTHER; note = 2'-fluoro modified nucleotide with phosphorothioate linkage
  modified_base 63: mod_base = OTHER; note = 2'-fluoro modified nucleotide with phosphorothioate linkage
  modified_base 67: mod_base = OTHER; note = 2'-fluoro modified nucleotide
  modified_base 71: mod_base = OTHER; note = 2'-fluoro modified nucleotide
  modified_base 75: mod_base = OTHER; note = 2'-O-methyl modified nucleotide

SEQ ID NO: 983 - RNA, 75 nt, synthetic construct; identical to SEQ ID NO: 897
  source 1..75: mol_type = other RNA
  modified_base 1: mod_base = OTHER; note = 2'-O-methyl modified nucleotide with phosphorothioate linkage
  modified_base 13: mod_base = OTHER; note = 2'-fluoro modified nucleotide with phosphorothioate linkage
  modified_base 16: mod_base = OTHER; note = Nucleotide attached to AN1 (C6-U phosphoramidite (5'-Dimethoxytrityl-5-[N-(trifluoroacetylaminohexyl)-3-acry limido]-Uridine, 2'-O-triisopropylsilyloxymethyl-3'-[(2-cyanoethyl)-(N,N-dii sopropyl)]-phosphoramidite))
  modified_base 19: mod_base = OTHER; note = Nucleotide with phosphorothioate linkage
  modified_base 20: mod_base = OTHER; note = 2'-fluoro modified nucleotide
  modified_base 28: mod_base = OTHER; note = 2'-fluoro modified nucleotide
  modified_base 40: mod_base = OTHER; note = 2'-fluoro modified nucleotide
  modified_base 42: mod_base = OTHER; note = 2'-fluoro modified nucleotide
  modified_base 52: mod_base = OTHER; note = 2'-fluoro modified nucleotide with phosphorothioate linkage
  modified_base 67: mod_base = OTHER; note = 2'-fluoro modified nucleotide
  modified_base 74: mod_base = OTHER; note = Nucleotide with phosphorothioate linkage
  modified_base 75: mod_base = OTHER; note = 2'-fluoro modified nucleotide

SEQ ID NO: 984 - RNA, 75 nt, synthetic construct; identical to SEQ ID NO: 897
  source 1..75: mol_type = other RNA
  modified_base 1: mod_base = OTHER; note = 2'-O-methyl modified nucleotide with phosphorothioate linkage
  modified_base 4: mod_base = OTHER; note = 2'-fluoro modified nucleotide with phosphorothioate linkage
  modified_base 16: mod_base = OTHER; note = Nucleotide attached to AN1 (C6-U phosphoramidite (5'-Dimethoxytrityl-5-[N-(trifluoroacetylaminohexyl)-3-acry limido]-Uridine, 2'-O-triisopropylsilyloxymethyl-3'-[(2-cyanoethyl)-(N,N-dii sopropyl)]-phosphoramidite))
  modified_base 28: mod_base = OTHER; note = 2'-O-methyl modified nucleotide
  modified_base 43: mod_base = OTHER; note = 2'-fluoro modified nucleotide
  modified_base 46: mod_base = OTHER; note = 2'-fluoro modified nucleotide
  modified_base 55: mod_base = OTHER; note = 2'-fluoro modified nucleotide
  modified_base 60: mod_base = OTHER; note = 2'-fluoro modified nucleotide
  modified_base 61: mod_base = OTHER; note = 2'-fluoro modified nucleotide
  modified_base 73: mod_base = OTHER; note = 2'-fluoro modified nucleotide with phosphorothioate linkage

SEQ ID NO: 985 - RNA, 75 nt, synthetic construct; identical to SEQ ID NO: 897
  source 1..75: mol_type = other RNA
  modified_base 1: mod_base = OTHER; note = 2'-fluoro modified nucleotide with phosphorothioate linkage
  modified_base 2: mod_base = OTHER; note = 2'-O-methyl modified nucleotide with phosphorothioate linkage
  modified_base 12: mod_base = OTHER; note = 2'-O-methyl modified nucleotide
  modified_base 13: mod_base = OTHER; note = Nucleotide with phosphorothioate linkage
  modified_base 16: mod_base = OTHER; note = 2'-fluoro modified Nucleotide attached to AN1 (C6-U phosphoramidite (5'-Dimethoxytrityl-5-[N-(trifluoroacetylaminohexyl)-3-acry limido]-Uridine, 2'-O-triisopropylsilyloxymethyl-3'-[(2-cyanoethyl)-(N,N-dii sopropyl)]-phosphoramidite))
  modified_base 22: mod_base = OTHER; note = 2'-fluoro modified nucleotide
  modified_base 23: mod_base = OTHER; note = 2'-fluoro modified nucleotide
  modified_base 28: mod_base = OTHER; note = 2'-fluoro modified nucleotide
  modified_base 29: mod_base = OTHER; note = 2'-O-methyl modified nucleotide
  modified_base 44: mod_base = OTHER; note = 2'-fluoro modified nucleotide
  modified_base 53: mod_base = OTHER; note = 2'-fluoro modified nucleotide with phosphorothioate linkage
  modified_base 65: mod_base = OTHER; note = Nucleotide with phosphorothioate linkage
  modified_base 66: mod_base = OTHER; note = Nucleotide with phosphorothioate linkage
  modified_base 67: mod_base = OTHER; note = 2'-fluoro modified nucleotide
  modified_base 73: mod_base = OTHER; note = Nucleotide with phosphorothioate linkage
  modified_base 74: mod_base = OTHER; note = 2'-O-methyl modified nucleotide
  modified_base 75: mod_base = OTHER; note = 2'-fluoro modified nucleotide

SEQ ID NO: 986 - RNA, 75 nt, synthetic construct; identical to SEQ ID NO: 897
  source 1..75: mol_type = other RNA
  modified_base 1: mod_base = OTHER; note = 2'-O-methyl modified nucleotide with phosphorothioate linkage
  modified_base 2: mod_base = OTHER; note = 2'-O-methyl modified nucleotide with phosphorothioate linkage
  modified_base 12: mod_base = OTHER; note = Nucleotide with phosphorothioate linkage
  modified_base 16: mod_base = OTHER; note = Nucleotide attached to AN1 (C6-U phosphoramidite (5'-Dimethoxytrityl-5-[N-(trifluoroacetylaminohexyl)-3-acry limido]-Uridine, 2'-O-triisopropylsilyloxymethyl-3'-[(2-cyanoethyl)-(N,N-dii sopropyl)]-phosphoramidite))
  modified_base 19: mod_base = OTHER; note = 2'-fluoro modified nucleotide
  modified_base 22: mod_base = OTHER; note = 2'-fluoro modified nucleotide
  modified_base 23: mod_base = OTHER; note = 2'-fluoro modified nucleotide
  modified_base 31: mod_base = OTHER; note = 2'-O-methyl modified nucleotide
  modified_base 50: mod_base = OTHER; note = Nucleotide with phosphorothioate linkage
  modified_base 51: mod_base = OTHER; note = 2'-fluoro modified nucleotide
  modified_base 63: mod_base = OTHER; note = Nucleotide with phosphorothioate linkage
  modified_base 66: mod_base = OTHER; note = 2'-fluoro modified nucleotide
  modified_base 73: mod_base = OTHER; note = Nucleotide with phosphorothioate linkage
  modified_base 74: mod_base = OTHER; note = 2'-O-methyl modified nucleotide

SEQ ID NO: 987 - RNA, 75 nt, synthetic construct; identical to SEQ ID NO: 897
  source 1..75: mol_type = other RNA
  modified_base 1: mod_base = OTHER; note = 2'-O-methyl modified nucleotide with phosphorothioate linkage
  modified_base 2: mod_base = OTHER; note = 2'-O-methyl modified nucleotide with phosphorothioate linkage
  modified_base 14: mod_base = OTHER; note = 2'-fluoro modified nucleotide
  modified_base 16: mod_base = OTHER; note = 2'-fluoro modified nucleotide
  modified_base 19: mod_base = OTHER; note = Nucleotide attached to AN1 (C6-U phosphoramidite (5'-Dimethoxytrityl-5-[N-(trifluoroacetylaminohexyl)-3-acry limido]-Uridine, 2'-O-triisopropylsilyloxymethyl-3'-[(2-cyanoethyl)-(N,N-dii sopropyl)]-phosphoramidite))
  modified_base 22: mod_base = OTHER; note = 2'-fluoro modified nucleotide
  modified_base 24: mod_base = OTHER; note = 2'-fluoro modified nucleotide
  modified_base 40: mod_base = OTHER; note = Nucleotide with phosphorothioate linkage
  modified_base 43: mod_base = OTHER; note = 2'-fluoro modified nucleotide
  modified_base 44: mod_base = OTHER; note = 2'-fluoro modified nucleotide
  modified_base 45: mod_base = OTHER; note = 2'-fluoro modified nucleotide with phosphorothioate linkage
  modified_base 51: mod_base = OTHER; note = 2'-fluoro modified nucleotide
  modified_base 60: mod_base = OTHER; note = 2'-fluoro modified nucleotide
  modified_base 73: mod_base = OTHER; note = Nucleotide with phosphorothioate linkage

SEQ ID NO: 988 - RNA, 75 nt, synthetic construct; identical to SEQ ID NO: 897
  source 1..75: mol_type = other RNA
  modified_base 1: mod_base = OTHER; note = 2'-O-methyl modified nucleotide with phosphorothioate linkage
  modified_base 2: mod_base = OTHER; note = 2'-O-methyl modified nucleotide with phosphorothioate linkage
  modified_base 12: mod_base = OTHER; note = Nucleotide with phosphorothioate linkage
  modified_base 13: mod_base = OTHER; note = 2'-fluoro modified nucleotide with phosphorothioate linkage
  modified_base 19: mod_base = OTHER; note = Nucleotide attached to AN1 (C6-U phosphoramidite (5'-Dimethoxytrityl-5-[N-(trifluoroacetylaminohexyl)-3-acry limido]-Uridine, 2'-O-triisopropylsilyloxymethyl-3'-[(2-cyanoethyl)-(N,N-dii sopropyl)]-phosphoramidite))
  modified_base 23: mod_base = OTHER; note = Nucleotide with phosphorothioate linkage
  modified_base 24: mod_base = OTHER; note = 2'-fluoro modified nucleotide
  modified_base 43: mod_base = OTHER; note = 2'-fluoro modified nucleotide
  modified_base 51: mod_base = OTHER; note = Nucleotide with phosphorothioate linkage
  modified_base 58: mod_base = OTHER; note = 2'-O-methyl modified nucleotide with phosphorothioate linkage
  modified_base 60: mod_base = OTHER; note = 2'-fluoro modified nucleotide
  modified_base 67: mod_base = OTHER; note = 2'-fluoro modified nucleotide
  modified_base 69: mod_base = OTHER; note = 2'-fluoro modified nucleotide
  modified_base 73: mod_base = OTHER; note = Nucleotide with phosphorothioate linkage
  modified_base 74: mod_base = OTHER; note = 2'-O-methyl modified nucleotide

SEQ ID NO: 989 - RNA, 75 nt, synthetic construct; identical to SEQ ID NO: 897
  source 1..75: mol_type = other RNA
  modified_base 1: mod_base = OTHER; note = 2'-O-methyl modified nucleotide with phosphorothioate linkage
  modified_base 2: mod_base = OTHER; note = 2'-fluoro modified nucleotide
  modified_base 19: mod_base = OTHER; note = Nucleotide with phosphorothioate linkage attached to C6-U phosphoramidite (5'-Dimethoxytrityl-5-[N-(trifluoroacetylaminohexyl)-3-acry limido]-Uridine, 2'-O-triisopropylsilyloxymethyl-3'-[(2-cyanoethyl)-(N,N-dii sopropyl)]-phosphoramidite)
  modified_base 20: mod_base = OTHER; note = 2'-fluoro modified nucleotide
  modified_base 23: mod_base = OTHER; note = Nucleotide with phosphorothioate linkage
  modified_base 24: mod_base = OTHER; note = 2'-fluoro modified nucleotide
  modified_base 28: mod_base = OTHER; note = 2'-fluoro modified nucleotide
  modified_base 38: mod_base = OTHER; note = Nucleotide with phosphorothioate linkage
  modified_base 39: mod_base = OTHER; note = 2'-fluoro modified nucleotide
  modified_base 51: mod_base = OTHER; note = Nucleotide with phosphorothioate linkage
  modified_base 60: mod_base = OTHER; note = 2'-fluoro modified nucleotide
  modified_base 65: mod_base = OTHER; note = Nucleotide with phosphorothioate linkage
  modified_base 73: mod_base = OTHER; note = Nucleotide with phosphorothioate linkage
  modified_base 74: mod_base = OTHER; note = 2'-O-methyl modified nucleotide

SEQ ID NO: 990 - RNA, 75 nt, synthetic construct; identical to SEQ ID NO: 897
  source 1..75: mol_type = other RNA
  modified_base 1: mod_base = OTHER; note = 2'-O-methyl modified nucleotide with phosphorothioate linkage
  modified_base 2: mod_base = OTHER; note = 2'-O-methyl modified nucleotide
  modified_base 13: mod_base = OTHER; note = Nucleotide with phosphorothioate linkage
  modified_base 14: mod_base = OTHER; note = 2'-fluoro modified nucleotide
  modified_base 19: mod_base = OTHER; note = Nucleotide attached to AN1 (C6-U phosphoramidite (5'-Dimethoxytrityl-5-[N-(trifluoroacetylaminohexyl)-3-acry limido]-Uridine, 2'-O-triisopropylsilyloxymethyl-3'-[(2-cyanoethyl)-(N,N-dii sopropyl)]-phosphoramidite))
  modified_base 22: mod_base = OTHER; note = 2'-fluoro modified nucleotide
  modified_base 23: mod_base = OTHER; note = 2'-fluoro modified nucleotide
  modified_base 27: mod_base = OTHER; note = 2'-fluoro modified nucleotide with phosphorothioate linkage
  modified_base 40: mod_base = OTHER; note = 2'-O-methyl modified nucleotide with phosphorothioate linkage
  modified_base 41: mod_base = OTHER; note = 2'-fluoro modified nucleotide
  modified_base 44: mod_base = OTHER; note = 2'-fluoro modified nucleotide
  modified_base 55: mod_base = OTHER; note = Nucleotide with phosphorothioate linkage
  modified_base 73: mod_base = OTHER; note = Nucleotide with phosphorothioate linkage
  modified_base 74: mod_base = OTHER; note = Nucleotide with phosphorothioate linkage

SEQ ID NO: 991 - RNA, 75 nt, synthetic construct; identical to SEQ ID NO: 897
  source 1..75: mol_type = other RNA
  modified_base 1: mod_base = OTHER; note = 2'-O-methyl modified nucleotide with phosphorothioate linkage
  modified_base 2: mod_base = OTHER; note = 2'-O-methyl modified nucleotide
  modified_base 12: mod_base = OTHER; note = 2'-O-methyl modified nucleotide
  modified_base 13: mod_base = OTHER; note = Nucleotide with phosphorothioate linkage
  modified_base 19: mod_base = OTHER; note = Nucleotide attached to AN1 (C6-U phosphoramidite (5'-Dimethoxytrityl-5-[N-(trifluoroacetylaminohexyl)-3-acry limido]-Uridine, 2'-O-triisopropylsilyloxymethyl-3'-[(2-cyanoethyl)-(N,N-dii sopropyl)]-phosphoramidite))
  modified_base 22: mod_base = OTHER; note = 2'-fluoro modified nucleotide
  modified_base 23: mod_base = OTHER; note = 2'-fluoro modified nucleotide
  modified_base 27: mod_base = OTHER; note = Nucleotide with phosphorothioate linkage
  modified_base 28: mod_base = OTHER; note = 2'-fluoro modified nucleotide
  modified_base 40: mod_base = OTHER; note = Nucleotide with phosphorothioate linkage
  modified_base 41: mod_base = OTHER; note = 2'-fluoro modified nucleotide
  modified_base 46: mod_base = OTHER; note = 2'-fluoro modified nucleotide
  modified_base 55: mod_base = OTHER; note = 2'-O-methyl modified nucleotide
  modified_base 63: mod_base = OTHER; note = Nucleotide with phosphorothioate linkage
  modified_base 64: mod_base = OTHER; note = Nucleotide with phosphorothioate linkage
  modified_base 67: mod_base = OTHER; note = 2'-fluoro modified nucleotide
  modified_base 73: mod_base = OTHER; note = Nucleotide with phosphorothioate linkage
  modified_base 74: mod_base = OTHER; note = 2'-O-methyl modified nucleotide

SEQ ID NO: 992 - RNA, 75 nt, synthetic construct; identical to SEQ ID NO: 897
  source 1..75: mol_type = other RNA
  modified_base 1: mod_base = OTHER; note = 2'-O-methyl modified nucleotide with phosphorothioate linkage
  modified_base 2: mod_base = OTHER; note = 2'-fluoro modified nucleotide with phosphorothioate linkage
  modified_base 18: mod_base = OTHER; note = 2'-fluoro modified nucleotide
  modified_base 19: mod_base = OTHER; note = 2'-fluoro modified Nucleotide attached to AN1 (C6-U phosphoramidite (5'-Dimethoxytrityl-5-[N-(trifluoroacetylaminohexyl)-3-acry limido]-Uridine, 2'-O-triisopropylsilyloxymethyl-3'-[(2-cyanoethyl)-(N,N-dii sopropyl)]-phosphoramidite))
  modified_base 20: mod_base = OTHER; note = 2'-fluoro modified nucleotide
  modified_base 23: mod_base = OTHER; note = Nucleotide with phosphorothioate linkage
  modified_base 24: mod_base = OTHER; note = 2'-fluoro modified nucleotide with phosphorothioate linkage
  modified_base 25: mod_base = OTHER; note = Nucleotide with phosphorothioate linkage
  modified_base 27: mod_base = OTHER; note = 2'-fluoro modified nucleotide
  modified_base 31: mod_base = OTHER; note = 2'-fluoro modified nucleotide
  modified_base 34: mod_base = OTHER; note = 2'-fluoro modified nucleotide
  modified_base 44: mod_base = OTHER; note = 2'-fluoro modified nucleotide
  modified_base 48: mod_base = OTHER; note = 2'-fluoro modified nucleotide with phosphorothioate linkage
  modified_base 63: mod_base = OTHER; note = 2'-fluoro modified nucleotide with phosphorothioate linkage
  modified_base 67: mod_base = OTHER; note = 2'-fluoro modified nucleotide
  modified_base 71: mod_base = OTHER; note = 2'-fluoro modified nucleotide
  modified_base 75: mod_base = OTHER; note = 2'-O-methyl modified nucleotide

SEQ ID NO: 993 - RNA, 75 nt, synthetic construct; identical to SEQ ID NO: 897
  source 1..75: mol_type = other RNA
  modified_base 1: mod_base = OTHER; note = 2'-O-methyl modified nucleotide with phosphorothioate linkage
  modified_base 13: mod_base = OTHER; note = 2'-fluoro modified nucleotide with phosphorothioate linkage
  modified_base 19: mod_base = OTHER; note = Nucleotide with phosphorothioate linkage attached to C6-U phosphoramidite (5'-Dimethoxytrityl-5-[N-(trifluoroacetylaminohexyl)-3-acry limido]-Uridine, 2'-O-triisopropylsilyloxymethyl-3'-[(2-cyanoethyl)-(N,N-dii sopropyl)]-phosphoramidite)
  modified_base 20: mod_base = OTHER; note = 2'-fluoro modified nucleotide
  modified_base 28: mod_base = OTHER; note = 2'-fluoro modified nucleotide
  modified_base 40: mod_base = OTHER; note = 2'-fluoro modified nucleotide
  modified_base 42: mod_base = OTHER; note = 2'-fluoro modified nucleotide
  modified_base 52: mod_base = OTHER; note = 2'-fluoro modified nucleotide with phosphorothioate linkage
  modified_base 67: mod_base = OTHER; note = 2'-fluoro modified nucleotide
  modified_base 74: mod_base = OTHER; note = Nucleotide with phosphorothioate linkage
  modified_base 75: mod_base = OTHER; note = 2'-fluoro modified nucleotide

SEQ ID NO: 994 - RNA, 75 nt, synthetic construct; identical to SEQ ID NO: 897
  source 1..75: mol_type = other RNA
  modified_base 1: mod_base = OTHER; note = 2'-O-methyl modified nucleotide with phosphorothioate linkage
  modified_base 4: mod_base = OTHER; note = 2'-fluoro modified nucleotide with phosphorothioate linkage
  modified_base 19: mod_base = OTHER; note = Nucleotide attached to AN1 (C6-U phosphoramidite (5'-Dimethoxytrityl-5-[N-(trifluoroacetylaminohexyl)-3-acry limido]-Uridine, 2'-O-triisopropylsilyloxymethyl-3'-[(2-cyanoethyl)-(N,N-dii sopropyl)]-phosphoramidite))
  modified_base 28: mod_base = OTHER; note = 2'-O-methyl modified nucleotide
  modified_base 43: mod_base = OTHER; note = 2'-fluoro modified nucleotide
  modified_base 46: mod_base = OTHER; note = 2'-fluoro modified nucleotide
  modified_base 55: mod_base = OTHER; note = 2'-fluoro modified nucleotide
  modified_base 60: mod_base = OTHER; note = 2'-fluoro modified nucleotide
  modified_base 61: mod_base = OTHER; note = 2'-fluoro modified nucleotide
  modified_base 73: mod_base = OTHER; note = 2'-fluoro modified nucleotide with phosphorothioate linkage

SEQ ID NO: 995 - RNA, 75 nt, synthetic construct; identical to SEQ ID NO: 897
  source 1..75: mol_type = other RNA
  modified_base 1: mod_base = OTHER; note = 2'-fluoro modified nucleotide with phosphorothioate linkage
  modified_base 2: mod_base = OTHER; note = 2'-O-methyl modified nucleotide with phosphorothioate linkage
  modified_base 12: mod_base = OTHER; note = 2'-O-methyl modified nucleotide
  modified_base 13: mod_base = OTHER; note = Nucleotide with phosphorothioate linkage
  modified_base 16: mod_base = OTHER; note = 2'-fluoro modified nucleotide
  modified_base 19: mod_base = OTHER; note = Nucleotide attached to AN1 (C6-U phosphoramidite (5'-Dimethoxytrityl-5-[N-(trifluoroacetylaminohexyl)-3-acry limido]-Uridine, 2'-O-triisopropylsilyloxymethyl-3'-[(2-cyanoethyl)-(N,N-dii sopropyl)]-phosphoramidite))
  modified_base 22: mod_base = OTHER; note = 2'-fluoro modified nucleotide
  modified_base 23: mod_base = OTHER; note = 2'-fluoro modified nucleotide
  modified_base 28: mod_base = OTHER; note = 2'-fluoro modified nucleotide
  modified_base 29: mod_base = OTHER; note = 2'-O-methyl modified nucleotide
  modified_base 44: mod_base = OTHER; note = 2'-fluoro modified nucleotide
  modified_base 53: mod_base = OTHER; note = 2'-fluoro modified nucleotide with phosphorothioate linkage
  modified_base 65: mod_base = OTHER; note = Nucleotide with phosphorothioate linkage
  modified_base 66: mod_base = OTHER; note = Nucleotide with phosphorothioate linkage
  modified_base 67: mod_base = OTHER; note = 2'-fluoro modified nucleotide
  modified_base 73: mod_base = OTHER; note = Nucleotide with phosphorothioate linkage
  modified_base 74: mod_base = OTHER; note = 2'-O-methyl modified nucleotide
  modified_base 75: mod_base = OTHER; note = 2'-fluoro modified nucleotide

SEQ ID NO: 996 - RNA, 75 nt, synthetic construct; identical to SEQ ID NO: 897
  source 1..75: mol_type = other RNA
  modified_base 1: mod_base = OTHER; note = 2'-O-methyl modified nucleotide with phosphorothioate linkage
  modified_base 2: mod_base = OTHER; note = 2'-O-methyl modified nucleotide with phosphorothioate linkage
  modified_base 12: mod_base = OTHER; note = Nucleotide with phosphorothioate linkage
  modified_base 19: mod_base = OTHER; note = 2'-fluoro modified Nucleotide attached to AN1 (C6-U phosphoramidite (5'-Dimethoxytrityl-5-[N-(trifluoroacetylaminohexyl)-3-acry limido]-Uridine, 2'-O-triisopropylsilyloxymethyl-3'-[(2-cyanoethyl)-(N,N-dii sopropyl)]-phosphoramidite))
  modified_base 22: mod_base = OTHER; note = 2'-fluoro modified nucleotide
  modified_base 23: mod_base = OTHER; note = 2'-fluoro modified nucleotide
  modified_base 31: mod_base = OTHER; note = 2'-O-methyl modified nucleotide
  modified_base 50: mod_base = OTHER; note = Nucleotide with phosphorothioate linkage
  modified_base 51: mod_base = OTHER; note = 2'-fluoro modified nucleotide
  modified_base 63: mod_base = OTHER; note = Nucleotide with phosphorothioate linkage
  modified_base 66: mod_base = OTHER; note = 2'-fluoro modified nucleotide
  modified_base 73: mod_base = OTHER; note = Nucleotide with phosphorothioate linkage
  modified_base 74: mod_base = OTHER; note = 2'-O-methyl modified nucleotide

SEQ ID NO: 997 - RNA, 75 nt, synthetic construct; identical to SEQ ID NO: 897
  source 1..75: mol_type = other RNA
  modified_base 1: mod_base = OTHER; note = 2'-O-methyl modified nucleotide with phosphorothioate linkage
  modified_base 2: mod_base = OTHER; note = 2'-O-methyl modified nucleotide with phosphorothioate linkage
  modified_base 14: mod_base = OTHER; note = 2'-fluoro modified nucleotide
  modified_base 16: mod_base = OTHER; note = 2'-fluoro modified nucleotide
  modified_base 22: mod_base = OTHER; note = 2'-fluoro modified nucleotide
  modified_base 24: mod_base = OTHER; note = 2'-fluoro modified nucleotide
  modified_base 40: mod_base = OTHER; note = Nucleotide with phosphorothioate linkage
  modified_base 43: mod_base = OTHER; note = 2'-fluoro modified nucleotide
  modified_base 44: mod_base = OTHER; note = 2'-fluoro modified nucleotide
  modified_base 45: mod_base = OTHER; note = 2'-fluoro modified nucleotide with phosphorothioate linkage
  modified_base 47: mod_base = OTHER; note = Nucleotide attached to AN1 (C6-U phosphoramidite (5'-Dimethoxytrityl-5-[N-(trifluoroacetylaminohexyl)-3-acry limido]-Uridine, 2'-O-triisopropylsilyloxymethyl-3'-[(2-cyanoethyl)-(N,N-dii sopropyl)]-phosphoramidite))
  modified_base 51: mod_base = OTHER; note = 2'-fluoro modified nucleotide
  modified_base 60: mod_base = OTHER; note = 2'-fluoro modified nucleotide
  modified_base 73: mod_base = OTHER; note = Nucleotide with phosphorothioate linkage

SEQ ID NO: 998 - RNA, 75 nt, synthetic construct; identical to SEQ ID NO: 897
  source 1..75: mol_type = other RNA
  modified_base 1: mod_base = OTHER; note = 2'-O-methyl modified nucleotide with phosphorothioate linkage
  modified_base 2: mod_base = OTHER; note = 2'-O-methyl modified nucleotide with phosphorothioate linkage
  modified_base 12: mod_base = OTHER; note = Nucleotide with phosphorothioate linkage
  modified_base 13: mod_base = OTHER; note = 2'-fluoro modified nucleotide with phosphorothioate linkage
  modified_base 23: mod_base = OTHER; note = Nucleotide with phosphorothioate linkage
  modified_base 24: mod_base = OTHER; note = 2'-fluoro modified nucleotide
  modified_base 43: mod_base = OTHER; note = 2'-fluoro modified nucleotide
  modified_base 47: mod_base = OTHER; note = Nucleotide attached to AN1 (C6-U phosphoramidite (5'-Dimethoxytrityl-5-[N-(trifluoroacetylaminohexyl)-3-acry limido]-Uridine, 2'-O-triisopropylsilyloxymethyl-3'-[(2-cyanoethyl)-(N,N-dii sopropyl)]-phosphoramidite))
  modified_base 51: mod_base = OTHER; note = Nucleotide with phosphorothioate linkage
  modified_base 58: mod_base = OTHER; note = 2'-O-methyl modified nucleotide with phosphorothioate linkage
  modified_base 60: mod_base = OTHER; note = 2'-fluoro modified nucleotide
  modified_base 67: mod_base = OTHER; note = 2'-fluoro modified nucleotide
  modified_base 69: mod_base = OTHER; note = 2'-fluoro modified nucleotide
  modified_base 73: mod_base = OTHER; note = Nucleotide with phosphorothioate linkage
  modified_base 74: mod_base = OTHER; note = 2'-O-methyl modified nucleotide

SEQ ID NO: 999 - RNA, 75 nt, synthetic construct; identical to SEQ ID NO: 897
  source 1..75: mol_type = other RNA
  modified_base 1: mod_base = OTHER; note = 2'-O-methyl modified nucleotide with phosphorothioate linkage
  modified_base 2: mod_base = OTHER; note = 2'-fluoro modified nucleotide
  modified_base 19: mod_base = OTHER; note = Nucleotide with phosphorothioate linkage
  modified_base 20: mod_base = OTHER; note = 2'-fluoro modified nucleotide
  modified_base 23: mod_base = OTHER; note = Nucleotide with phosphorothioate linkage
  modified_base 24: mod_base = OTHER; note = 2'-fluoro modified nucleotide
  modified_base 28: mod_base = OTHER; note = 2'-fluoro modified nucleotide
  modified_base 38: mod_base = OTHER; note = Nucleotide with phosphorothioate linkage
  modified_base 39: mod_base = OTHER; note = 2'-fluoro modified nucleotide
  modified_base 47: mod_base = OTHER; note = Nucleotide attached to AN1 (C6-U phosphoramidite (5'-Dimethoxytrityl-5-[N-(trifluoroacetylaminohexyl)-3-acry limido]-Uridine, 2'-O-triisopropylsilyloxymethyl-3'-[(2-cyanoethyl)-(N,N-dii sopropyl)]-phosphoramidite))
  modified_base 51: mod_base = OTHER; note = Nucleotide with phosphorothioate linkage
  modified_base 60: mod_base = OTHER; note = 2'-fluoro modified nucleotide
  modified_base 65: mod_base = OTHER; note = Nucleotide with phosphorothioate linkage
  modified_base 73: mod_base = OTHER; note = Nucleotide with phosphorothioate linkage
  modified_base 74: mod_base = OTHER; note = 2'-O-methyl modified nucleotide

SEQ ID NO: 1000 - RNA, 75 nt, synthetic construct; identical to SEQ ID NO: 897
  source 1..75: mol_type = other RNA
  modified_base 1: mod_base = OTHER; note = 2'-O-methyl modified nucleotide with phosphorothioate linkage
  modified_base 2: mod_base = OTHER; note = 2'-O-methyl modified nucleotide
  modified_base 13: mod_base = OTHER; note = Nucleotide with phosphorothioate linkage
  modified_base 14: mod_base = OTHER; note = 2'-fluoro modified nucleotide
  modified_base 22: mod_base = OTHER; note = 2'-fluoro modified nucleotide
  modified_base 23: mod_base = OTHER; note = 2'-fluoro modified nucleotide
  modified_base 27: mod_base = OTHER; note = 2'-fluoro modified nucleotide with phosphorothioate linkage
  modified_base 40: mod_base = OTHER; note = 2'-O-methyl modified nucleotide with phosphorothioate linkage
  modified_base 41: mod_base = OTHER; note = 2'-fluoro modified nucleotide
  modified_base 44: mod_base = OTHER; note = 2'-fluoro modified nucleotide
  modified_base 47: mod_base = OTHER; note = Nucleotide attached to AN1 (C6-U phosphoramidite (5'-Dimethoxytrityl-5-[N-(trifluoroacetylaminohexyl)-3-acry limido]-Uridine, 2'-O-triisopropylsilyloxymethyl-3'-[(2-cyanoethyl)-(N,N-dii sopropyl)]-phosphoramidite))
  modified_base 55: mod_base = OTHER; note = Nucleotide with phosphorothioate linkage
  modified_base 73: mod_base = OTHER; note = Nucleotide with phosphorothioate linkage
  modified_base 74: mod_base = OTHER; note = Nucleotide with phosphorothioate linkage

SEQ ID NO: 1001 - RNA, 75 nt, synthetic construct; identical to SEQ ID NO: 897
  source 1..75: mol_type = other RNA
  modified_base 1: mod_base = OTHER; note = 2'-O-methyl modified nucleotide with phosphorothioate linkage
  modified_base 2: mod_base = OTHER; note = 2'-O-methyl modified nucleotide
  modified_base 12: mod_base = OTHER; note = 2'-O-methyl modified nucleotide
  modified_base 13: mod_base = OTHER; note = Nucleotide with phosphorothioate linkage
  modified_base 22: mod_base = OTHER; note = 2'-fluoro modified nucleotide
  modified_base 23: mod_base = OTHER; note = 2'-fluoro modified nucleotide
  modified_base 27: mod_base = OTHER; note = Nucleotide with phosphorothioate linkage
  modified_base 28: mod_base = OTHER; note = 2'-fluoro modified nucleotide
  modified_base 40: mod_base = OTHER; note = Nucleotide with phosphorothioate linkage
  modified_base 41: mod_base = OTHER; note = 2'-fluoro modified nucleotide
  modified_base 46: mod_base = OTHER; note = 2'-fluoro modified nucleotide
  modified_base 47: mod_base = OTHER; note = Nucleotide attached to AN1 (C6-U phosphoramidite (5'-Dimethoxytrityl-5-[N-(trifluoroacetylaminohexyl)-3-acry limido]-Uridine, 2'-O-triisopropylsilyloxymethyl-3'-[(2-cyanoethyl)-(N,N-dii sopropyl)]-phosphoramidite))
  modified_base 55: mod_base = OTHER; note = 2'-O-methyl modified nucleotide
  modified_base 63: mod_base = OTHER; note = Nucleotide with phosphorothioate linkage
  modified_base 64: mod_base = OTHER; note = Nucleotide with phosphorothioate linkage
  modified_base 67: mod_base = OTHER; note = 2'-fluoro modified nucleotide
  modified_base 73: mod_base = OTHER; note = Nucleotide with phosphorothioate linkage
  modified_base 74: mod_base = OTHER; note = 2'-O-methyl modified nucleotide

SEQ ID NO: 1002 - RNA, 75 nt, synthetic construct; identical to SEQ ID NO: 897
  source 1..75: mol_type = other RNA
  modified_base 1: mod_base = OTHER; note = 2'-O-methyl modified nucleotide with phosphorothioate linkage
  modified_base 2: mod_base = OTHER; note = 2'-fluoro modified nucleotide with phosphorothioate linkage
  modified_base 18: mod_base = OTHER; note = 2'-fluoro modified nucleotide
  modified_base 19: mod_base = OTHER; note = 2'-fluoro modified nucleotide
  modified_base 20: mod_base = OTHER; note = 2'-fluoro modified nucleotide
  modified_base 23: mod_base = OTHER; note = Nucleotide with phosphorothioate linkage
  modified_base 24: mod_base = OTHER; note = 2'-fluoro modified nucleotide with phosphorothioate linkage
  modified_base 25: mod_base = OTHER; note = Nucleotide with phosphorothioate linkage
  modified_base 27: mod_base = OTHER; note = 2'-fluoro modified nucleotide
  modified_base 31: mod_base = OTHER; note = 2'-fluoro modified nucleotide
  modified_base 34: mod_base = OTHER; note = 2'-fluoro modified nucleotide
  modified_base 44: mod_base = OTHER; note = 2'-fluoro modified nucleotide
  modified_base 47: mod_base = OTHER; note = Nucleotide attached to AN1 (C6-U phosphoramidite (5'-Dimethoxytrityl-5-[N-(trifluoroacetylaminohexyl)-3-acry limido]-Uridine, 2'-O-triisopropylsilyloxymethyl-3'-[(2-cyanoethyl)-(N,N-dii sopropyl)]-phosphoramidite))
  modified_base 48: mod_base = OTHER; note = 2'-fluoro modified nucleotide with phosphorothioate linkage
  modified_base 63: mod_base = OTHER; note = 2'-fluoro modified nucleotide with phosphorothioate linkage
  modified_base 67: mod_base = OTHER; note = 2'-fluoro modified nucleotide
  modified_base 71: mod_base = OTHER; note = 2'-fluoro modified nucleotide
  modified_base 75: mod_base = OTHER; note = 2'-O-methyl modified nucleotide

SEQ ID NO: 1003 - RNA, 75 nt, synthetic construct; identical to SEQ ID NO: 897
  source 1..75: mol_type = other RNA
  modified_base 1: mod_base = OTHER; note = 2'-O-methyl modified nucleotide with phosphorothioate linkage
  modified_base 13: mod_base = OTHER; note = 2'-fluoro modified nucleotide with phosphorothioate linkage
  modified_base 19: mod_base = OTHER; note = Nucleotide with phosphorothioate linkage
  modified_base 20: mod_base = OTHER; note = 2'-fluoro modified nucleotide
  modified_base 28: mod_base = OTHER; note = 2'-fluoro modified nucleotide
  modified_base 40: mod_base = OTHER; note = 2'-fluoro modified nucleotide
  modified_base 42: mod_base = OTHER; note = 2'-fluoro modified nucleotide
  modified_base 47: mod_base = OTHER; note = Nucleotide attached to AN1 (C6-U phosphoramidite (5'-Dimethoxytrityl-5-[N-(trifluoroacetylaminohexyl)-3-acry limido]-Uridine, 2'-O-triisopropylsilyloxymethyl-3'-[(2-cyanoethyl)-(N,N-dii sopropyl)]-phosphoramidite))
  modified_base 52: mod_base = OTHER; note = 2'-fluoro modified nucleotide with phosphorothioate linkage
  modified_base 67: mod_base = OTHER; note = 2'-fluoro modified nucleotide
  modified_base 74: mod_base = OTHER; note = Nucleotide with phosphorothioate linkage
  modified_base 75: mod_base = OTHER; note = 2'-fluoro modified nucleotide

SEQ ID NO: 1004 - RNA, 75 nt, synthetic construct; identical to SEQ ID NO: 897
  source 1..75: mol_type = other RNA
  modified_base 1: mod_base = OTHER; note = 2'-O-methyl modified nucleotide with phosphorothioate linkage
  modified_base 4: mod_base = OTHER; note = 2'-fluoro modified nucleotide with phosphorothioate linkage
  modified_base 28: mod_base = OTHER; note = 2'-O-methyl modified nucleotide
  modified_base 43: mod_base = OTHER; note = 2'-fluoro modified nucleotide
  modified_base 46: mod_base = OTHER; note = 2'-fluoro modified nucleotide
  modified_base 47: mod_base = OTHER; note = Nucleotide attached to AN1 (C6-U phosphoramidite (5'-Dimethoxytrityl-5-[N-(trifluoroacetylaminohexyl)-3-acry limido]-Uridine, 2'-O-triisopropylsilyloxymethyl-3'-[(2-cyanoethyl)-(N,N-dii sopropyl)]-phosphoramidite))
  modified_base 55: mod_base = OTHER; note = 2'-fluoro modified nucleotide
  modified_base 60: mod_base = OTHER; note = 2'-fluoro modified nucleotide
  modified_base 61: mod_base = OTHER; note = 2'-fluoro modified nucleotide
  modified_base 73: mod_base = OTHER; note = 2'-fluoro modified nucleotide with phosphorothioate linkage

SEQ ID NO: 1005 - RNA, 75 nt, synthetic construct; identical to SEQ ID NO: 897
  source 1..75: mol_type = other RNA
  modified_base 1: mod_base = OTHER; note = 2'-fluoro modified nucleotide with phosphorothioate linkage
  modified_base 2: mod_base = OTHER; note = 2'-O-methyl modified nucleotide with phosphorothioate linkage
  modified_base 12: mod_base = OTHER; note = 2'-O-methyl modified nucleotide
  modified_base 13: mod_base = OTHER; note = Nucleotide with phosphorothioate linkage
  modified_base 16: mod_base = OTHER; note = 2'-fluoro modified nucleotide
  modified_base 22: mod_base = OTHER; note = 2'-fluoro modified nucleotide
  modified_base 23: mod_base = OTHER; note = 2'-fluoro modified nucleotide
  modified_base 28: mod_base = OTHER; note = 2'-fluoro modified nucleotide
  modified_base 29: mod_base = OTHER; note = 2'-O-methyl modified nucleotide
  modified_base 44: mod_base = OTHER; note = 2'-fluoro modified nucleotide
  modified_base 47: mod_base = OTHER; note = Nucleotide attached to AN1 (C6-U phosphoramidite (5'-Dimethoxytrityl-5-[N-(trifluoroacetylaminohexyl)-3-acry limido]-Uridine, 2'-O-triisopropylsilyloxymethyl-3'-[(2-cyanoethyl)-(N,N-dii sopropyl)]-phosphoramidite))
  modified_base 53: mod_base = OTHER; note = 2'-fluoro modified nucleotide with phosphorothioate linkage
  modified_base 65: mod_base = OTHER; note = Nucleotide with phosphorothioate linkage
  modified_base 66: mod_base = OTHER; note = Nucleotide with phosphorothioate linkage
  modified_base 67: mod_base = OTHER; note = 2'-fluoro modified nucleotide
  modified_base 73: mod_base = OTHER; note = Nucleotide with phosphorothioate linkage
  modified_base 74: mod_base = OTHER; note = 2'-O-methyl modified nucleotide
  modified_base 75: mod_base = OTHER; note = 2'-fluoro modified nucleotide

SEQ ID NO: 1006 - RNA, 75 nt, synthetic construct; identical to SEQ ID NO: 897
  source 1..75: mol_type = other RNA
  modified_base 1: mod_base = OTHER; note = 2'-O-methyl modified nucleotide with phosphorothioate linkage
  modified_base 2: mod_base = OTHER; note = 2'-O-methyl modified nucleotide with phosphorothioate linkage
  modified_base 12: mod_base = OTHER; note = Nucleotide with phosphorothioate linkage
  modified_base 19: mod_base = OTHER; note = 2'-fluoro modified nucleotide
  modified_base 22: mod_base = OTHER; note = 2'-fluoro modified nucleotide
  modified_base 23: mod_base = OTHER; note = 2'-fluoro modified nucleotide
  modified_base 31: mod_base = OTHER; note = 2'-O-methyl modified nucleotide
  modified_base 47: mod_base = OTHER; note = Nucleotide attached to AN1 (C6-U phosphoramidite (5'-Dimethoxytrityl-5-[N-(trifluoroacetylaminohexyl)-3-acry limido]-Uridine, 2'-O-triisopropylsilyloxymethyl-3'-[(2-cyanoethyl)-(N,N-dii sopropyl)]-phosphoramidite))
  modified_base 50: mod_base = OTHER; note = Nucleotide with phosphorothioate linkage
  modified_base 51: mod_base = OTHER; note = 2'-fluoro modified nucleotide
  modified_base 63: mod_base = OTHER; note = Nucleotide with phosphorothioate linkage
  modified_base 66: mod_base = OTHER; note = 2'-fluoro modified nucleotide
  modified_base 73: mod_base = OTHER; note = Nucleotide with phosphorothioate linkage
  modified_base 74: mod_base = OTHER; note = 2'-O-methyl modified nucleotide

SEQ ID NO: 1007 - RNA, 85 nt, synthetic construct; identical to SEQ ID NO: 641
  source 1..85: mol_type = other RNA
  modified_base 83: mod_base = OTHER; note = 2'-fluoro modified nucleotide

SEQ ID NO: 1008 - RNA, 85 nt, synthetic construct; identical to SEQ ID NO: 641
  source 1..85: mol_type = other RNA
  modified_base 84: mod_base = OTHER; note = 2'-fluoro modified nucleotide

SEQ ID NO: 1009 - RNA, 85 nt, synthetic construct; identical to SEQ ID NO: 641
  source 1..85: mol_type = other RNA
  modified_base 1: mod_base = OTHER; note = 2'-O-methyl modified nucleotide
  modified_base 2: mod_base = OTHER; note = 2'-O-methyl modified nucleotide
  modified_base 3: mod_base = OTHER; note = 2'-O-methyl modified nucleotide
  modified_base 4: mod_base = OTHER; note = 2'-O-methyl modified nucleotide
  modified_base 13: mod_base = OTHER; note = 2'-O-methyl modified nucleotide
  modified_base 17: mod_base = OTHER; note = 2'-O-methyl modified nucleotide
  modified_base 18: mod_base = OTHER; note = 2'-O-methyl modified nucleotide
  modified_base 59: mod_base = OTHER; note = 2'-O-methyl modified nucleotide
  modified_base 61: mod_base = OTHER; note = 2'-O-methyl modified nucleotide
  modified_base 75: mod_base = OTHER; note = 2'-O-methyl modified nucleotide
  modified_base 82: mod_base = OTHER; note = 2'-O-methyl modified nucleotide

SEQ ID NO: 1010 - RNA, 85 nt, synthetic construct; identical to SEQ ID NO: 641
  source 1..85: mol_type = other RNA
  modified_base 85: mod_base = OTHER; note = 2'-fluoro modified nucleotide

SEQ ID NO: 1011 - RNA, 85 nt, synthetic construct; identical to SEQ ID NO: 641
  source 1..85: mol_type = other RNA
  modified_base 1: mod_base = OTHER; note = 2'-O-methyl modified nucleotide
  modified_base 2: mod_base = OTHER; note = 2'-O-methyl modified nucleotide
  modified_base 3: mod_base = OTHER; note = 2'-O-methyl modified nucleotide
  modified_base 4: mod_base = OTHER; note = 2'-O-methyl modified nucleotide
  modified_base 13: mod_base = OTHER; note = 2'-O-methyl modified nucleotide
  modified_base 17: mod_base = OTHER; note = 2'-O-methyl modified nucleotide
  modified_base 18: mod_base = OTHER; note = 2'-O-methyl modified nucleotide
  modified_base 59: mod_base = OTHER; note = 2'-O-methyl modified nucleotide
  modified_base 61: mod_base = OTHER; note = 2'-O-methyl modified nucleotide
  modified_base 82: mod_base = OTHER; note = 2'-O-methyl modified nucleotide

SEQ ID NO: 1012 - RNA, 85 nt, synthetic construct
  source 1..85: mol_type = other RNA
  modified_base 1: mod_base = OTHER; note = 2'-O-methyl modified nucleotide with phosphorothioate linkage
  modified_base 2: mod_base = OTHER; note = 2'-O-methyl modified nucleotide with phosphorothioate linkage
  modified_base 30: mod_base = OTHER; note = 2'-O-methyl modified nucleotide with phosphorothioate linkage
  modified_base 43: mod_base = OTHER; note = 2'-O-methyl modified nucleotide
  modified_base 56: mod_base = OTHER; note = 2'-O-methyl modified nucleotide with phosphorothioate linkage
  modified_base 61: mod_base = OTHER; note = 2'-fluoro modified nucleotide with phosphorothioate linkage
  modified_base 63: mod_base = OTHER; note = 2'-fluoro modified nucleotide with phosphorothioate linkage
  modified_base 82: mod_base = OTHER; note = 2'-O-methyl modified nucleotide
gctgtgatggccgagtggttaaggcgttggactctaaatccaatggggtctccccgcgcaggttcgaatcctgctcacagcgcca

SEQ ID NO: 1013 - RNA, 85 nt, synthetic construct; identical to SEQ ID NO: 1012
  source 1..85: mol_type = other RNA
  modified_base 1: mod_base = OTHER; note = 2'-O-methyl modified nucleotide with phosphorothioate linkage
  modified_base 2: mod_base = OTHER; note = Nucleotide with phosphorothioate linkage
  modified_base 25: mod_base = OTHER; note = 2'-fluoro modified nucleotide with phosphorothioate linkage
  modified_base 30: mod_base = OTHER; note = Nucleotide with phosphorothioate linkage
  modified_base 52: mod_base = OTHER; note = 2'-O-methyl modified nucleotide with phosphorothioate linkage
  modified_base 58: mod_base = OTHER; note = Nucleotide with phosphorothioate linkage
  modified_base 62: mod_base = OTHER; note = 2'-O-methyl modified nucleotide
  modified_base 80: mod_base = OTHER; note = 2'-O-methyl modified nucleotide
  modified_base 83: mod_base = OTHER; note = Nucleotide with phosphorothioate linkage

SEQ ID NO: 1014 - RNA, 85 nt, synthetic construct; identical to SEQ ID NO: 1012
  source 1..85: mol_type = other RNA
  modified_base 1: mod_base = OTHER; note = 2'-O-methyl modified nucleotide with phosphorothioate linkage
  modified_base 2: mod_base = OTHER; note = 2'-O-methyl modified nucleotide
  modified_base 4: mod_base = OTHER; note = 2'-O-methyl modified nucleotide
  modified_base 15: mod_base = OTHER; note = 2'-O-methyl modified nucleotide
  modified_base 17: mod_base = OTHER; note = Nucleotide with phosphorothioate linkage
  modified_base 27: mod_base = OTHER; note = 2'-fluoro modified nucleotide
  modified_base 58: mod_base = OTHER; note = 2'-O-methyl modified nucleotide with phosphorothioate linkage
  modified_base 62: mod_base = OTHER; note = 2'-O-methyl modified nucleotide

SEQ ID NO: 1015 - RNA, 85 nt, synthetic construct; identical to SEQ ID NO: 1012
  source 1..85: mol_type = other RNA
  modified_base 1: mod_base = OTHER; note = 2'-O-methyl modified nucleotide with phosphorothioate linkage
  modified_base 2: mod_base = OTHER; note = Nucleotide with phosphorothioate linkage
  modified_base 18: mod_base = OTHER; note = Nucleotide with phosphorothioate linkage
  modified_base 24: mod_base = OTHER; note = 2'-fluoro modified nucleotide
  modified_base 37: mod_base = OTHER; note = Nucleotide with phosphorothioate linkage
  modified_base 53: mod_base = OTHER; note = 2'-O-methyl modified nucleotide
  modified_base 82: mod_base = OTHER; note = 2'-O-methyl modified nucleotide with phosphorothioate linkage

SEQ ID NO: 1016 - RNA, 85 nt, synthetic construct; identical to SEQ ID NO: 1012
  source 1..85: mol_type = other RNA
  modified_base 1: mod_base = OTHER; note = 2'-O-methyl modified nucleotide with phosphorothioate linkage
  modified_base 2: mod_base = OTHER; note = 2'-O-methyl modified nucleotide with phosphorothioate linkage
  modified_base 8: mod_base = OTHER; note = 2'-fluoro modified nucleotide
  modified_base 14: mod_base = OTHER; note = 2'-O-methyl modified nucleotide with phosphorothioate linkage
  modified_base 24: mod_base = OTHER; note = Nucleotide with phosphorothioate linkage
  modified_base 30: mod_base = OTHER; note = 2'-fluoro modified nucleotide with phosphorothioate linkage
  modified_base 61: mod_base = OTHER; note = Nucleotide with phosphorothioate linkage
  modified_base 63: mod_base = OTHER; note = 2'-O-methyl modified nucleotide

SEQ ID NO: 1017 - RNA, 85 nt, synthetic construct; identical to SEQ ID NO: 641
  source 1..85: mol_type = other RNA
  modified_base 1: mod_base = OTHER; note = Nucleotide attached to N-acetylgalactosamine-triethylamine
  modified_base 83: mod_base = OTHER; note = 2'-fluoro modified nucleotide

SEQ ID NO: 1018 - RNA, 85 nt, synthetic construct; identical to SEQ ID NO: 641
  source 1..85: mol_type = other RNA
  modified_base 1: mod_base = OTHER; note = Nucleotide attached to N-acetylgalactosamine-triethylamine
  modified_base 84: mod_base = OTHER; note = 2'-fluoro modified nucleotide

SEQ ID NO: 1019 - RNA, 85 nt, synthetic construct; identical to SEQ ID NO: 641
  source 1..85: mol_type = other RNA
  modified_base 1: mod_base = OTHER; note = 2'-O-methyl modified nucleotide attached to N-acetylgalactosamine-triethylamine
  modified_base 2: mod_base = OTHER; note = 2'-O-methyl modified nucleotide
  modified_base 3: mod_base = OTHER; note = 2'-O-methyl modified nucleotide
  modified_base 4: mod_base = OTHER; note = 2'-O-methyl modified nucleotide
  modified_base 13: mod_base = OTHER; note = 2'-O-methyl modified nucleotide
  modified_base 17: mod_base = OTHER; note = 2'-O-methyl modified nucleotide
  modified_base 18: mod_base = OTHER; note = 2'-O-methyl modified nucleotide
  modified_base 59: mod_base = OTHER; note = 2'-O-methyl modified nucleotide
  modified_base 61: mod_base = OTHER; note = 2'-O-methyl modified nucleotide
  modified_base 75: mod_base = OTHER; note = 2'-O-methyl modified nucleotide
  modified_base 82: mod_base = OTHER; note = 2'-O-methyl modified nucleotide

SEQ ID NO: 1020 - RNA, 85 nt, synthetic construct; identical to SEQ ID NO: 641
  source 1..85: mol_type = other RNA
  modified_base 1: mod_base = OTHER; note = Nucleotide attached to N-acetylgalactosamine-triethylamine
  modified_base 85: mod_base = OTHER; note = 2'-fluoro modified nucleotide

SEQ ID NO: 1021 - RNA, 85 nt, synthetic construct; identical to SEQ ID NO: 641
  source 1..85: mol_type = other RNA
  modified_base 1: mod_base = OTHER; note = 2'-O-methyl modified nucleotide attached to N-acetylgalactosamine-triethylamine
  modified_base 2: mod_base = OTHER; note = 2'-O-methyl modified nucleotide
  modified_base 3: mod_base = OTHER; note = 2'-O-methyl modified nucleotide
  modified_base 4: mod_base = OTHER; note = 2'-O-methyl modified nucleotide
  modified_base 13: mod_base = OTHER; note = 2'-O-methyl modified nucleotide
  modified_base 17: mod_base = OTHER; note = 2'-O-methyl modified nucleotide
  modified_base 18: mod_base = OTHER; note = 2'-O-methyl modified nucleotide
  modified_base 59: mod_base = OTHER; note = 2'-O-methyl modified nucleotide
  modified_base 61: mod_base = OTHER; note = 2'-O-methyl modified nucleotide
  modified_base 82: mod_base = OTHER; note = 2'-O-methyl modified nucleotide

SEQ ID NO: 1022 - RNA, 85 nt, synthetic construct; identical to SEQ ID NO: 1012
  source 1..85: mol_type = other RNA
  modified_base 1: mod_base = OTHER; note = 2'-O-methyl modified nucleotide with phosphorothioate linkage attached to N-acetylgalactosamine-triethylamine
  modified_base 2: mod_base = OTHER; note = 2'-O-methyl modified nucleotide with phosphorothioate linkage
  modified_base 30: mod_base = OTHER; note = 2'-O-methyl modified nucleotide with phosphorothioate linkage
  modified_base 43: mod_base = OTHER; note = 2'-O-methyl modified nucleotide
  modified_base 56: mod_base = OTHER; note = 2'-O-methyl modified nucleotide with phosphorothioate linkage
  modified_base 61: mod_base = OTHER; note = 2'-fluoro modified nucleotide with phosphorothioate linkage
  modified_base 63: mod_base = OTHER; note = 2'-fluoro modified nucleotide with phosphorothioate linkage
  modified_base 82: mod_base = OTHER; note = 2'-O-methyl modified nucleotide

SEQ ID NO: 1023 - RNA, 85 nt, synthetic construct; identical to SEQ ID NO: 1012
  source 1..85: mol_type = other RNA
  modified_base 1: mod_base = OTHER; note = 2'-O-methyl modified nucleotide with phosphorothioate linkage attached to N-acetylgalactosamine-triethylamine
  modified_base 2: mod_base = OTHER; note = Nucleotide with phosphorothioate linkage
  modified_base 25: mod_base = OTHER; note = 2'-fluoro modified nucleotide with phosphorothioate linkage
  modified_base 30: mod_base = OTHER; note = Nucleotide with phosphorothioate linkage
  modified_base 52: mod_base = OTHER; note = 2'-O-methyl modified nucleotide with phosphorothioate linkage
  modified_base 58: mod_base = OTHER; note = Nucleotide with phosphorothioate linkage
  modified_base 62: mod_base = OTHER; note = 2'-O-methyl modified nucleotide
  modified_base 80: mod_base = OTHER; note = 2'-O-methyl modified nucleotide
  modified_base 83: mod_base = OTHER; note = Nucleotide with phosphorothioate linkage

SEQ ID NO: 1024 - RNA, 85 nt, synthetic construct; identical to SEQ ID NO: 1012
  source 1..85: mol_type = other RNA
  modified_base 1: mod_base = OTHER; note = 2'-O-methyl modified nucleotide with phosphorothioate linkage attached to N-acetylgalactosamine-triethylamine
  modified_base 2: mod_base = OTHER; note = 2'-O-methyl modified nucleotide
  modified_base 4: mod_base = OTHER; note = 2'-O-methyl modified nucleotide
  modified_base 15: mod_base = OTHER; note = 2'-O-methyl modified nucleotide
  modified_base 17: mod_base = OTHER; note = Nucleotide with phosphorothioate linkage
  modified_base 27: mod_base = OTHER; note = 2'-fluoro modified nucleotide
  modified_base 58: mod_base = OTHER; note = 2'-O-methyl modified nucleotide with phosphorothioate linkage
  modified_base 62: mod_base = OTHER; note = 2'-O-methyl modified nucleotide

SEQ ID NO: 1025 - RNA, 85 nt, synthetic construct; identical to SEQ ID NO: 1012
  source 1..85: mol_type = other RNA
  modified_base 1: mod_base = OTHER; note = 2'-O-methyl modified nucleotide with phosphorothioate linkage attached to N-acetylgalactosamine-triethylamine
  modified_base 2: mod_base = OTHER; note = Nucleotide with phosphorothioate linkage
  modified_base 18: mod_base = OTHER; note = Nucleotide with phosphorothioate linkage
  modified_base 24: mod_base = OTHER; note = 2'-fluoro modified nucleotide
  modified_base 37: mod_base = OTHER; note = Nucleotide with phosphorothioate linkage
  modified_base 53: mod_base = OTHER; note = 2'-O-methyl modified nucleotide
  modified_base 82: mod_base = OTHER; note = 2'-O-methyl modified nucleotide with phosphorothioate linkage

SEQ ID NO: 1026 - RNA, 85 nt, synthetic construct; identical to SEQ ID NO: 1012
  source 1..85: mol_type = other RNA
  modified_base 1: mod_base = OTHER; note = 2'-O-methyl modified nucleotide with phosphorothioate linkage attached to N-acetylgalactosamine-triethylamine
  modified_base 2: mod_base = OTHER; note = 2'-O-methyl modified nucleotide with phosphorothioate linkage
  modified_base 8: mod_base = OTHER; note = 2'-fluoro modified nucleotide
  modified_base 14: mod_base = OTHER; note = 2'-O-methyl modified nucleotide with phosphorothioate linkage
  modified_base 24: mod_base = OTHER; note = Nucleotide with phosphorothioate linkage
  modified_base 30: mod_base = OTHER; note = 2'-fluoro modified nucleotide with phosphorothioate linkage
  modified_base 61: mod_base = OTHER; note = Nucleotide with phosphorothioate linkage
  modified_base 63: mod_base = OTHER; note = 2'-O-methyl modified nucleotide

SEQ ID NO: 1027 - RNA, 85 nt, synthetic construct; identical to SEQ ID NO: 641
  source 1..85: mol_type = other RNA
  modified_base 16: mod_base = OTHER; note = Nucleotide attached to N-acetylgalactosamine
  modified_base 83: mod_base = OTHER; note = 2'-fluoro modified nucleotide

SEQ ID NO: 1028 - RNA, 85 nt, synthetic construct; identical to SEQ ID NO: 641
  source 1..85: mol_type = other RNA
  modified_base 16: mod_base = OTHER; note = Nucleotide attached to N-acetylgalactosamine
  modified_base 84: mod_base = OTHER; note = 2'-fluoro modified nucleotide

SEQ ID NO: 1029 - RNA, 85 nt, synthetic construct; identical to SEQ ID NO: 641
  source 1..85: mol_type = other RNA
  modified_base 1: mod_base = OTHER; note = 2'-O-methyl modified nucleotide
  modified_base 2: mod_base = OTHER; note = 2'-O-methyl modified nucleotide
  modified_base 3: mod_base = OTHER; note = 2'-O-methyl modified nucleotide
  modified_base 4: mod_base = OTHER; note = 2'-O-methyl modified nucleotide
  modified_base 13: mod_base = OTHER; note = 2'-O-methyl modified nucleotide
  modified_base 16: mod_base = OTHER; note = Nucleotide attached to N-acetylgalactosamine
  modified_base 17: mod_base = OTHER; note = 2'-O-methyl modified nucleotide
  modified_base 18: mod_base = OTHER; note = 2'-O-methyl modified nucleotide
  modified_base 59: mod_base = OTHER; note = 2'-O-methyl modified nucleotide
  modified_base 61: mod_base = OTHER; note = 2'-O-methyl modified nucleotide
  modified_base 75: mod_base = OTHER; note = 2'-O-methyl modified nucleotide
  modified_base 82: mod_base = OTHER; note = 2'-O-methyl modified nucleotide

SEQ ID NO: 1030 - RNA, 85 nt, synthetic construct; identical to SEQ ID NO: 641
  source 1..85: mol_type = other RNA
  modified_base 16: mod_base = OTHER; note = Nucleotide attached to N-acetylgalactosamine
  modified_base 85: mod_base = OTHER; note = 2'-fluoro modified nucleotide

SEQ ID NO: 1031 - RNA, 85 nt, synthetic construct; identical to SEQ ID NO: 641
  source 1..85: mol_type = other RNA
  modified_base 1: mod_base = OTHER; note = 2'-O-methyl modified nucleotide
  modified_base 2: mod_base = OTHER; note = 2'-O-methyl modified nucleotide
  modified_base 3: mod_base = OTHER; note = 2'-O-methyl modified nucleotide
  modified_base 4: mod_base = OTHER; note = 2'-O-methyl modified nucleotide
  modified_base 13: mod_base = OTHER; note = 2'-O-methyl modified nucleotide
  modified_base 16: mod_base = OTHER; note = Nucleotide attached to N-acetylgalactosamine
  modified_base 17: mod_base = OTHER; note = 2'-O-methyl modified nucleotide
  modified_base 18: mod_base = OTHER; note = 2'-O-methyl modified nucleotide
  modified_base 59: mod_base = OTHER; note = 2'-O-methyl modified nucleotide
  modified_base 61: mod_base = OTHER; note = 2'-O-methyl modified nucleotide
  modified_base 82: mod_base = OTHER; note = 2'-O-methyl modified nucleotide

SEQ ID NO: 1032 - RNA, 85 nt, synthetic construct; identical to SEQ ID NO: 1012
  source 1..85: mol_type = other RNA
  modified_base 1: mod_base = OTHER; note = 2'-O-methyl modified nucleotide with phosphorothioate linkage
  modified_base 2: mod_base = OTHER; note = 2'-O-methyl modified nucleotide with phosphorothioate linkage
  modified_base 16: mod_base = OTHER; note = Nucleotide attached to N-acetylgalactosamine
  modified_base 30: mod_base = OTHER; note = 2'-O-methyl modified nucleotide with phosphorothioate linkage
  modified_base 43: mod_base = OTHER; note = 2'-O-methyl modified nucleotide
  modified_base 56: mod_base = OTHER; note = 2'-O-methyl modified nucleotide with phosphorothioate linkage
  modified_base 61: mod_base = OTHER; note = 2'-fluoro modified nucleotide with phosphorothioate linkage
  modified_base 63: mod_base = OTHER; note = 2'-fluoro modified nucleotide with phosphorothioate linkage
  modified_base 82: mod_base = OTHER; note = 2'-O-methyl modified nucleotide

SEQ ID NO: 1033 - RNA, 85 nt, synthetic construct; identical to SEQ ID NO: 1012
  source 1..85: mol_type = other RNA
  modified_base 1: mod_base = OTHER; note = 2'-O-methyl modified nucleotide with phosphorothioate linkage
  modified_base 2: mod_base = OTHER; note = Nucleotide with phosphorothioate linkage
  modified_base 16: mod_base = OTHER; note = Nucleotide attached to N-acetylgalactosamine
  modified_base 25: mod_base = OTHER; note = 2'-fluoro modified nucleotide with phosphorothioate linkage
  modified_base 30: mod_base = OTHER; note = Nucleotide with phosphorothioate linkage
  modified_base 52: mod_base = OTHER; note = 2'-O-methyl modified nucleotide with phosphorothioate linkage
  modified_base 58: mod_base = OTHER; note = Nucleotide with phosphorothioate linkage
  modified_base 62: mod_base = OTHER; note = 2'-O-methyl modified nucleotide
  modified_base 80: mod_base = OTHER; note = 2'-O-methyl modified nucleotide
  modified_base 83: mod_base = OTHER; note = Nucleotide with phosphorothioate linkage

SEQ ID NO: 1034 - RNA, 85 nt, synthetic construct; identical to SEQ ID NO: 1012
  source 1..85: mol_type = other RNA
  modified_base 1: mod_base = OTHER; note = 2'-O-methyl modified nucleotide with phosphorothioate linkage
  modified_base 2: mod_base = OTHER; note = 2'-O-methyl modified nucleotide
  modified_base 4: mod_base = OTHER; note = 2'-O-methyl modified nucleotide
  modified_base 15: mod_base = OTHER; note = 2'-O-methyl modified nucleotide
  modified_base 16: mod_base = OTHER; note = Nucleotide attached to N-acetylgalactosamine
  modified_base 17: mod_base = OTHER; note = Nucleotide with phosphorothioate linkage
  modified_base 27: mod_base = OTHER; note = 2'-fluoro modified nucleotide
  modified_base 58: mod_base = OTHER; note = 2'-O-methyl modified nucleotide with phosphorothioate linkage
  modified_base 62: mod_base = OTHER; note = 2'-O-methyl modified nucleotide

SEQ ID NO: 1035 - RNA, 85 nt, synthetic construct; identical to SEQ ID NO: 1012
  source 1..85: mol_type = other RNA
  modified_base 1: mod_base = OTHER; note = 2'-O-methyl modified nucleotide with phosphorothioate linkage
  modified_base 2: mod_base = OTHER; note = Nucleotide with phosphorothioate linkage
  modified_base 16: mod_base = OTHER; note = Nucleotide attached to N-acetylgalactosamine
  modified_base 18: mod_base = OTHER; note = Nucleotide with phosphorothioate linkage
  modified_base 24: mod_base = OTHER; note = 2'-fluoro modified nucleotide
  modified_base 37: mod_base = OTHER; note = Nucleotide with phosphorothioate linkage
  modified_base 53: mod_base = OTHER; note = 2'-O-methyl modified nucleotide
  modified_base 82: mod_base = OTHER; note = 2'-O-methyl modified nucleotide with phosphorothioate linkage

SEQ ID NO: 1036 - RNA, 85 nt, synthetic construct; identical to SEQ ID NO: 1012
  source 1..85: mol_type = other RNA
  modified_base 1: mod_base = OTHER; note = 2'-O-methyl modified nucleotide with phosphorothioate linkage
  modified_base 2: mod_base = OTHER; note = 2'-O-methyl modified nucleotide with phosphorothioate linkage
  modified_base 8: mod_base = OTHER; note = 2'-fluoro modified nucleotide
  modified_base 14: mod_base = OTHER; note = 2'-O-methyl modified nucleotide with phosphorothioate linkage
  modified_base 16: mod_base = OTHER; note = Nucleotide attached to N-acetylgalactosamine
  modified_base 24: mod_base = OTHER; note = Nucleotide with phosphorothioate linkage
  modified_base 30: mod_base = OTHER; note = 2'-fluoro modified nucleotide with phosphorothioate linkage
  modified_base 61: mod_base = OTHER; note = Nucleotide with phosphorothioate linkage
  modified_base 63: mod_base = OTHER; note = 2'-O-methyl modified nucleotide

SEQ ID NO: 1037 - RNA, 85 nt, synthetic construct; identical to SEQ ID NO: 641
  source 1..85: mol_type = other RNA
  modified_base 20: mod_base = OTHER; note = Nucleotide attached to N-acetylgalactosamine
  modified_base 83: mod_base = OTHER; note = 2'-fluoro modified nucleotide

SEQ ID NO: 1038 - RNA, 85 nt, synthetic construct; identical to SEQ ID NO: 641
  source 1..85: mol_type = other RNA
  modified_base 20: mod_base = OTHER; note = Nucleotide attached to N-acetylgalactosamine
  modified_base 84: mod_base = OTHER; note = 2'-fluoro modified nucleotide

SEQ ID NO: 1039 - RNA, 85 nt, synthetic construct; identical to SEQ ID NO: 641
  source 1..85: mol_type = other RNA
  modified_base 1: mod_base = OTHER; note = 2'-O-methyl modified nucleotide
  modified_base 2: mod_base = OTHER; note = 2'-O-methyl modified nucleotide
  modified_base 3: mod_base = OTHER; note = 2'-O-methyl modified nucleotide
  modified_base 4: mod_base = OTHER; note = 2'-O-methyl modified nucleotide
  modified_base 13: mod_base = OTHER; note = 2'-O-methyl modified nucleotide
  modified_base 17: mod_base = OTHER; note = 2'-O-methyl modified nucleotide
  modified_base 18: mod_base = OTHER; note = 2'-O-methyl modified nucleotide
  modified_base 20: mod_base = OTHER; note = Nucleotide attached to N-acetylgalactosamine
  modified_base 59: mod_base = OTHER; note = 2'-O-methyl modified nucleotide
  modified_base 61: mod_base = OTHER; note = 2'-O-methyl modified nucleotide
  modified_base 75: mod_base = OTHER; note = 2'-O-methyl modified nucleotide
  modified_base 82: mod_base = OTHER; note = 2'-O-methyl modified nucleotide

SEQ ID NO: 1040 - RNA, 85 nt, synthetic construct; identical to SEQ ID NO: 641
  source 1..85: mol_type = other RNA
  modified_base 20: mod_base = OTHER; note = Nucleotide attached to N-acetylgalactosamine
  modified_base 85: mod_base = OTHER; note = 2'-fluoro modified nucleotide

SEQ ID NO: 1041 - RNA, 85 nt, synthetic construct; identical to SEQ ID NO: 641
  source 1..85: mol_type = other RNA
  modified_base 1: mod_base = OTHER; note = 2'-O-methyl modified nucleotide
  modified_base 2: mod_base = OTHER; note = 2'-O-methyl modified nucleotide
  modified_base 3: mod_base = OTHER; note = 2'-O-methyl modified nucleotide
  modified_base 4: mod_base = OTHER; note = 2'-O-methyl modified nucleotide
  modified_base 13: mod_base = OTHER; note = 2'-O-methyl modified nucleotide
  modified_base 17: mod_base = OTHER; note = 2'-O-methyl modified nucleotide
  modified_base 18: mod_base = OTHER; note = 2'-O-methyl modified nucleotide
  modified_base 20: mod_base = OTHER; note = Nucleotide attached to N-acetylgalactosamine
  modified_base 59: mod_base = OTHER; note = 2'-O-methyl modified nucleotide
  modified_base 61: mod_base = OTHER; note = 2'-O-methyl modified nucleotide
  modified_base 82: mod_base = OTHER; note = 2'-O-methyl modified nucleotide

SEQ ID NO: 1042 - RNA, 85 nt, synthetic construct; identical to SEQ ID NO: 1012
  source 1..85: mol_type = other RNA
  modified_base 1: mod_base = OTHER; note = 2'-O-methyl modified nucleotide with phosphorothioate linkage
  modified_base 2: mod_base = OTHER; note = 2'-O-methyl modified nucleotide with phosphorothioate linkage
  modified_base 20: mod_base = OTHER; note = Nucleotide attached to N-acetylgalactosamine
  modified_base 30: mod_base = OTHER; note = 2'-O-methyl modified nucleotide with phosphorothioate linkage
  modified_base 43: mod_base = OTHER; note = 2'-O-methyl modified nucleotide
  modified_base 56: mod_base = OTHER; note = 2'-O-methyl modified nucleotide with phosphorothioate linkage
  modified_base 61: mod_base = OTHER; note = 2'-fluoro modified nucleotide with phosphorothioate linkage
  modified_base 63: mod_base = OTHER; note = 2'-fluoro modified nucleotide with phosphorothioate linkage
  modified_base 82: mod_base = OTHER; note = 2'-O-methyl modified nucleotide

SEQ ID NO: 1043 - RNA, 85 nt, synthetic construct; identical to SEQ ID NO: 1012
  source 1..85: mol_type = other RNA
  modified_base 1: mod_base = OTHER; note = 2'-O-methyl modified nucleotide with phosphorothioate linkage
  modified_base 2: mod_base = OTHER; note = Nucleotide with phosphorothioate linkage
  modified_base 20: mod_base = OTHER; note = Nucleotide attached to N-acetylgalactosamine
  modified_base 25: mod_base = OTHER; note = 2'-fluoro modified nucleotide with phosphorothioate linkage
  modified_base 30: mod_base = OTHER; note = Nucleotide with phosphorothioate linkage
  modified_base 52: mod_base = OTHER; note = 2'-O-methyl modified nucleotide with phosphorothioate linkage
  modified_base 58: mod_base = OTHER; note = Nucleotide with phosphorothioate linkage
  modified_base 62: mod_base = OTHER; note = 2'-O-methyl modified nucleotide
  modified_base 80: mod_base = OTHER; note = 2'-O-methyl modified nucleotide
  modified_base 83: mod_base = OTHER; note = Nucleotide with phosphorothioate linkage

SEQ ID NO: 1044 - RNA, 85 nt, synthetic construct; identical to SEQ ID NO: 1012
  source 1..85: mol_type = other RNA
  modified_base 1: mod_base = OTHER; note = 2'-O-methyl modified nucleotide with phosphorothioate linkage
  modified_base 2: mod_base = OTHER; note = 2'-O-methyl modified nucleotide
  modified_base 4: mod_base = OTHER; note = 2'-O-methyl modified nucleotide
  modified_base 15: mod_base = OTHER; note = 2'-O-methyl modified nucleotide
  modified_base 17: mod_base = OTHER; note = Nucleotide with phosphorothioate linkage
  modified_base 20: mod_base = OTHER; note = Nucleotide attached to N-acetylgalactosamine
  modified_base 27: mod_base = OTHER; note = 2'-fluoro modified nucleotide
  modified_base 58: mod_base = OTHER; note = 2'-O-methyl modified nucleotide with phosphorothioate linkage
  modified_base 62: mod_base = OTHER; note = 2'-O-methyl modified nucleotide

SEQ ID NO: 1045 - RNA, 85 nt, synthetic construct; identical to SEQ ID NO: 1012
  source 1..85: mol_type = other RNA
  modified_base 1: mod_base = OTHER; note = 2'-O-methyl modified nucleotide with phosphorothioate linkage
  modified_base 2: mod_base = OTHER; note = Nucleotide with phosphorothioate linkage
  modified_base 18: mod_base = OTHER; note = Nucleotide with phosphorothioate linkage
  modified_base 20: mod_base = OTHER; note = Nucleotide attached to N-acetylgalactosamine
  modified_base 24: mod_base = OTHER; note = 2'-fluoro modified nucleotide
  modified_base 37: mod_base = OTHER; note = Nucleotide with phosphorothioate linkage
  modified_base 53: mod_base = OTHER; note = 2'-O-methyl modified nucleotide
  modified_base 82: mod_base = OTHER; note = 2'-O-methyl modified nucleotide with phosphorothioate linkage

SEQ ID NO: 1046 - RNA, 85 nt, synthetic construct; identical to SEQ ID NO: 1012
  source 1..85: mol_type = other RNA
  modified_base 1: mod_base = OTHER; note = 2'-O-methyl modified nucleotide with phosphorothioate linkage
  modified_base 2: mod_base = OTHER; note = 2'-O-methyl modified nucleotide with phosphorothioate linkage
  modified_base 8: mod_base = OTHER; note = 2'-fluoro modified nucleotide
  modified_base 14: mod_base = OTHER; note = 2'-O-methyl modified nucleotide with phosphorothioate linkage
  modified_base 20: mod_base = OTHER; note = Nucleotide attached to N-acetylgalactosamine
  modified_base 24: mod_base = OTHER; note = Nucleotide with phosphorothioate linkage
  modified_base 30: mod_base = OTHER; note = 2'-fluoro modified nucleotide with phosphorothioate linkage
  modified_base 61: mod_base = OTHER; note = Nucleotide with phosphorothioate linkage
  modified_base 63: mod_base = OTHER; note = 2'-O-methyl modified nucleotide

SEQ ID NO: 1047 - RNA, 85 nt, synthetic construct; identical to SEQ ID NO: 641
  source 1..85: mol_type = other RNA
  modified_base 46: mod_base = OTHER; note = Nucleotide attached to N-acetylgalactosamine
  modified_base 83: mod_base = OTHER; note = 2'-fluoro modified nucleotide

SEQ ID NO: 1048 - RNA, 85 nt, synthetic construct; identical to SEQ ID NO: 641
  source 1..85: mol_type = other RNA
  modified_base 46: mod_base = OTHER; note = Nucleotide attached to N-acetylgalactosamine
  modified_base 84: mod_base = OTHER; note = 2'-fluoro modified nucleotide

SEQ ID NO: 1049 - RNA, 85 nt, synthetic construct; identical to SEQ ID NO: 641
  source 1..85: mol_type = other RNA
  modified_base 1: mod_base = OTHER; note = 2'-O-methyl modified nucleotide
  modified_base 2: mod_base = OTHER; note = 2'-O-methyl modified nucleotide
  modified_base 3: mod_base = OTHER; note = 2'-O-methyl modified nucleotide
  modified_base 4: mod_base = OTHER; note = 2'-O-methyl modified nucleotide
  modified_base 13: mod_base = OTHER; note = 2'-O-methyl modified nucleotide
  modified_base 17: mod_base = OTHER; note = 2'-O-methyl modified nucleotide
  modified_base 18: mod_base = OTHER; note = 2'-O-methyl modified nucleotide
  modified_base 46: mod_base = OTHER; note = Nucleotide attached to N-acetylgalactosamine
  modified_base 59: mod_base = OTHER; note = 2'-O-methyl modified nucleotide
  modified_base 61: mod_base = OTHER; note = 2'-O-methyl modified nucleotide
  modified_base 75: mod_base = OTHER; note = 2'-O-methyl modified nucleotide
  modified_base 82: mod_base = OTHER; note = 2'-O-methyl modified nucleotide

SEQ ID NO: 1050 - RNA, 85 nt, synthetic construct; identical to SEQ ID NO: 641
  source 1..85: mol_type = other RNA
  modified_base 46: mod_base = OTHER; note = Nucleotide attached to N-acetylgalactosamine
  modified_base 85: mod_base = OTHER; note = 2'-fluoro modified nucleotide

SEQ ID NO: 1051 - RNA, 85 nt, synthetic construct; identical to SEQ ID NO: 641
  source 1..85: mol_type = other RNA
  modified_base 1: mod_base = OTHER; note = 2'-O-methyl modified nucleotide
  modified_base 2: mod_base = OTHER; note = 2'-O-methyl modified nucleotide
  modified_base 3: mod_base = OTHER; note = 2'-O-methyl modified nucleotide
  modified_base 4: mod_base = OTHER; note = 2'-O-methyl modified nucleotide
  modified_base 13: mod_base = OTHER; note = 2'-O-methyl modified nucleotide
  modified_base 17: mod_base = OTHER; note = 2'-O-methyl modified nucleotide
  modified_base 18: mod_base = OTHER; note = 2'-O-methyl modified nucleotide
  modified_base 46: mod_base = OTHER; note = Nucleotide attached to N-acetylgalactosamine
  modified_base 59: mod_base = OTHER; note = 2'-O-methyl modified nucleotide
  modified_base 61: mod_base = OTHER; note = 2'-O-methyl modified nucleotide
  modified_base 82: mod_base = OTHER; note = 2'-O-methyl modified nucleotide

SEQ ID NO: 1052 - RNA, 85 nt, synthetic construct; identical to SEQ ID NO: 1012
  source 1..85: mol_type = other RNA
  modified_base 1: mod_base = OTHER; note = 2'-O-methyl modified nucleotide with phosphorothioate linkage
  modified_base 2: mod_base = OTHER; note = 2'-O-methyl modified nucleotide with phosphorothioate linkage
  modified_base 30: mod_base = OTHER; note = 2'-O-methyl modified nucleotide with phosphorothioate linkage
  modified_base 43: mod_base = OTHER; note = 2'-O-methyl modified nucleotide
  modified_base 46: mod_base = OTHER; note = Nucleotide attached to N-acetylgalactosamine
  modified_base 56: mod_base = OTHER; note = 2'-O-methyl modified nucleotide with phosphorothioate linkage
  modified_base 61: mod_base = OTHER; note = 2'-fluoro modified nucleotide with phosphorothioate linkage
  modified_base 63: mod_base = OTHER; note = 2'-fluoro modified nucleotide with phosphorothioate linkage
  modified_base 82: mod_base = OTHER; note = 2'-O-methyl modified nucleotide

SEQ ID NO: 1053 - RNA, 85 nt, synthetic construct; identical to SEQ ID NO: 1012
  source 1..85: mol_type = other RNA
  modified_base 1: mod_base = OTHER; note = 2'-O-methyl modified nucleotide with phosphorothioate linkage
  modified_base 2: mod_base = OTHER; note = Nucleotide with phosphorothioate linkage
  modified_base 25: mod_base = OTHER; note = 2'-fluoro modified nucleotide with phosphorothioate linkage
  modified_base 30: mod_base = OTHER; note = Nucleotide with phosphorothioate linkage
  modified_base 46: mod_base = OTHER; note = Nucleotide attached to N-acetylgalactosamine
  modified_base 52: mod_base = OTHER; note = 2'-O-methyl modified nucleotide with phosphorothioate linkage
  modified_base 58: mod_base = OTHER; note = Nucleotide with phosphorothioate linkage
  modified_base 62: mod_base = OTHER; note = 2'-O-methyl modified nucleotide
  modified_base 80: mod_base = OTHER; note = 2'-O-methyl modified nucleotide
  modified_base 83: mod_base = OTHER; note = Nucleotide with phosphorothioate linkage

SEQ ID NO: 1054 - RNA, 85 nt, synthetic construct; identical to SEQ ID NO: 1012
  source 1..85: mol_type = other RNA
  modified_base 1: mod_base = OTHER; note = 2'-O-methyl modified nucleotide with phosphorothioate linkage
  modified_base 2: mod_base = OTHER; note = 2'-O-methyl modified nucleotide
  modified_base 4: mod_base = OTHER; note = 2'-O-methyl modified nucleotide
  modified_base 15: mod_base = OTHER; note = 2'-O-methyl modified nucleotide
  modified_base 17: mod_base = OTHER; note = Nucleotide with phosphorothioate linkage
  modified_base 27: mod_base = OTHER; note = 2'-fluoro modified nucleotide
  modified_base 46: mod_base = OTHER; note = Nucleotide attached to N-acetylgalactosamine
  modified_base 58: mod_base = OTHER; note = 2'-O-methyl modified nucleotide with phosphorothioate linkage
  modified_base 62: mod_base = OTHER; note = 2'-O-methyl modified nucleotide

SEQ ID NO: 1055 - RNA, 85 nt, synthetic construct; identical to SEQ ID NO: 1012
  source 1..85: mol_type = other RNA
  modified_base 1: mod_base = OTHER; note = 2'-O-methyl modified nucleotide with phosphorothioate linkage
  modified_base 2: mod_base = OTHER; note = Nucleotide with phosphorothioate linkage
  modified_base 18: mod_base = OTHER; note = Nucleotide with phosphorothioate linkage
  modified_base 24: mod_base = OTHER; note = 2'-fluoro modified nucleotide
  modified_base 37: mod_base = OTHER; note = Nucleotide with phosphorothioate linkage
  modified_base 46: mod_base = OTHER; note = Nucleotide attached to N-acetylgalactosamine
  modified_base 53: mod_base = OTHER; note = 2'-O-methyl modified nucleotide
  modified_base 82: mod_base = OTHER; note = 2'-O-methyl modified nucleotide with phosphorothioate linkage

SEQ ID NO: 1056 - RNA, 85 nt, synthetic construct; identical to SEQ ID NO: 1012
  source 1..85: mol_type = other RNA
  modified_base 1: mod_base = OTHER; note = 2'-O-methyl modified nucleotide with phosphorothioate linkage
  modified_base 2: mod_base = OTHER; note = 2'-O-methyl modified nucleotide with phosphorothioate linkage
  modified_base 8: mod_base = OTHER; note = 2'-fluoro modified nucleotide
  modified_base 14: mod_base = OTHER; note = 2'-O-methyl modified nucleotide with phosphorothioate linkage
  modified_base 24: mod_base = OTHER; note = Nucleotide with phosphorothioate linkage
  modified_base 30: mod_base = OTHER; note = 2'-fluoro modified nucleotide with phosphorothioate linkage
  modified_base 46: mod_base = OTHER; note = Nucleotide attached to N-acetylgalactosamine
  modified_base 61: mod_base = OTHER; note = Nucleotide with phosphorothioate linkage
  modified_base 63: mod_base = OTHER; note = 2'-O-methyl modified nucleotide

SEQ ID NO: 1057 - RNA, 85 nt, synthetic construct; identical to SEQ ID NO: 641
  source 1..85: mol_type = other RNA
  modified_base 1: mod_base = OTHER; note = Nucleotide attached to cyanine3 dye
  modified_base 16: mod_base = OTHER; note = Nucleotide attached to N-acetylgalactosamine
  modified_base 83: mod_base = OTHER; note = 2'-fluoro modified nucleotide

SEQ ID NO: 1058 - RNA, 85 nt, synthetic construct; identical to SEQ ID NO: 641
  source 1..85: mol_type = other RNA
  modified_base 1: mod_base = OTHER; note = Nucleotide attached to cyanine3 dye
  modified_base 16: mod_base = OTHER; note = Nucleotide attached to N-acetylgalactosamine
  modified_base 84: mod_base = OTHER; note = 2'-fluoro modified nucleotide

SEQ ID NO: 1059 - RNA, 85 nt, synthetic construct; identical to SEQ ID NO: 641
  source 1..85: mol_type = other RNA
  modified_base 1: mod_base = OTHER; note = 2'-O-methyl modified nucleotide attached to cyanine3 dye
  modified_base 2: mod_base = OTHER; note = 2'-O-methyl modified nucleotide
  modified_base 3: mod_base = OTHER; note = 2'-O-methyl modified nucleotide
  modified_base 4: mod_base = OTHER; note = 2'-O-methyl modified nucleotide
  modified_base 13: mod_base = OTHER; note = 2'-O-methyl modified nucleotide
  modified_base 16: mod_base = OTHER; note = Nucleotide attached to N-acetylgalactosamine
  modified_base 17: mod_base = OTHER; note = 2'-O-methyl modified nucleotide
  modified_base 18: mod_base = OTHER; note = 2'-O-methyl modified nucleotide
  modified_base 59: mod_base = OTHER; note = 2'-O-methyl modified nucleotide
  modified_base 61: mod_base = OTHER; note = 2'-O-methyl modified nucleotide
  modified_base 75: mod_base = OTHER; note = 2'-O-methyl modified nucleotide
  modified_base 82: mod_base = OTHER; note = 2'-O-methyl modified nucleotide

SEQ ID NO: 1060 - RNA, 85 nt, synthetic construct; identical to SEQ ID NO: 641
  source 1..85: mol_type = other RNA
  modified_base 1: mod_base = OTHER; note = Nucleotide attached to cyanine3 dye
  modified_base 16: mod_base = OTHER; note = Nucleotide attached to N-acetylgalactosamine
  modified_base 85: mod_base = OTHER; note = 2'-fluoro modified nucleotide

SEQ ID NO: 1061 - RNA, 85 nt, synthetic construct; identical to SEQ ID NO: 641
  source 1..85: mol_type = other RNA
  modified_base 1: mod_base = OTHER; note = 2'-O-methyl modified nucleotide attached to cyanine3 dye
  modified_base 2: mod_base = OTHER; note = 2'-O-methyl modified nucleotide
  modified_base 3: mod_base = OTHER; note = 2'-O-methyl modified nucleotide
  modified_base 4: mod_base = OTHER; note = 2'-O-methyl modified nucleotide
  modified_base 13: mod_base = OTHER; note = 2'-O-methyl modified nucleotide
  modified_base 16: mod_base = OTHER; note = Nucleotide attached to N-acetylgalactosamine
  modified_base 17: mod_base = OTHER; note = 2'-O-methyl modified nucleotide
  modified_base 18: mod_base = OTHER; note = 2'-O-methyl modified nucleotide
  modified_base 59: mod_base = OTHER; note = 2'-O-methyl modified nucleotide
  modified_base 61: mod_base = OTHER; note = 2'-O-methyl modified nucleotide
  modified_base 82: mod_base = OTHER; note = 2'-O-methyl modified nucleotide

SEQ ID NO: 1062 - RNA, 85 nt, synthetic construct; identical to SEQ ID NO: 1012
  source 1..85: mol_type = other RNA
  modified_base 1: mod_base = OTHER; note = 2'-O-methyl modified nucleotide with phosphorothioate linkage attached to cyanine3 dye
  modified_base 2: mod_base = OTHER; note = 2'-O-methyl modified nucleotide with phosphorothioate linkage
  modified_base 16: mod_base = OTHER; note = Nucleotide attached to N-acetylgalactosamine
  modified_base 30: mod_base = OTHER; note = 2'-O-methyl modified nucleotide with phosphorothioate linkage
  modified_base 43: mod_base = OTHER; note = 2'-O-methyl modified nucleotide
  modified_base 56: mod_base = OTHER; note = 2'-O-methyl modified nucleotide with phosphorothioate linkage
  modified_base 61: mod_base = OTHER; note = 2'-fluoro modified nucleotide with phosphorothioate linkage
  modified_base 63: mod_base = OTHER; note = 2'-fluoro modified nucleotide with phosphorothioate linkage
  modified_base 82: mod_base = OTHER; note = 2'-O-methyl modified nucleotide

SEQ ID NO: 1063 - RNA, 85 nt, synthetic construct; identical to SEQ ID NO: 1012
  source 1..85: mol_type = other RNA
  modified_base 1: mod_base = OTHER; note = 2'-O-methyl modified nucleotide with phosphorothioate linkage attached to cyanine3 dye
  modified_base 2: mod_base = OTHER; note = Nucleotide with phosphorothioate linkage
  modified_base 16: mod_base = OTHER; note = Nucleotide attached to N-acetylgalactosamine
  modified_base 25: mod_base = OTHER; note = 2'-fluoro modified nucleotide with phosphorothioate linkage
  modified_base 30: mod_base = OTHER; note = Nucleotide with phosphorothioate linkage
  modified_base 52: mod_base = OTHER; note = 2'-O-methyl modified nucleotide with phosphorothioate linkage
  modified_base 58: mod_base = OTHER; note = Nucleotide with phosphorothioate linkage
  modified_base 62: mod_base = OTHER; note = 2'-O-methyl modified nucleotide
  modified_base 80: mod_base = OTHER; note = 2'-O-methyl modified nucleotide
  modified_base 83: mod_base = OTHER; note = Nucleotide with phosphorothioate linkage

SEQ ID NO: 1064 - RNA, 85 nt, synthetic construct; identical to SEQ ID NO: 1012
  source 1..85: mol_type = other RNA
  modified_base 1: mod_base = OTHER; note = 2'-O-methyl modified nucleotide with phosphorothioate linkage attached to cyanine3 dye
  modified_base 2: mod_base = OTHER; note = 2'-O-methyl modified nucleotide
  modified_base 4: mod_base = OTHER; note = 2'-O-methyl modified nucleotide
  modified_base 15: mod_base = OTHER; note = 2'-O-methyl modified nucleotide
  modified_base 16: mod_base = OTHER; note = Nucleotide attached to N-acetylgalactosamine
  modified_base 17: mod_base = OTHER; note = Nucleotide with phosphorothioate linkage
  modified_base 27: mod_base = OTHER; note = 2'-fluoro modified nucleotide
  modified_base 58: mod_base = OTHER; note = 2'-O-methyl modified nucleotide with phosphorothioate linkage
  modified_base 62: mod_base = OTHER; note = 2'-O-methyl modified nucleotide

SEQ ID NO: 1065 - RNA, 85 nt, synthetic construct; identical to SEQ ID NO: 1012
  source 1..85: mol_type = other RNA
  modified_base 1: mod_base = OTHER; note = 2'-O-methyl modified nucleotide with phosphorothioate linkage attached to cyanine3 dye
  modified_base 2: mod_base = OTHER; note = Nucleotide with phosphorothioate linkage
  modified_base 16: mod_base = OTHER; note = Nucleotide attached to N-acetylgalactosamine
  modified_base 18: mod_base = OTHER; note = Nucleotide with phosphorothioate linkage
  modified_base 24: mod_base = OTHER; note = 2'-fluoro modified nucleotide
  modified_base 37: mod_base = OTHER; note = Nucleotide with phosphorothioate linkage
  modified_base 53: mod_base = OTHER; note = 2'-O-methyl modified nucleotide
  modified_base 82: mod_base = OTHER; note = 2'-O-methyl modified nucleotide with phosphorothioate linkage

SEQ ID NO: 1066 - RNA, 85 nt, synthetic construct; identical to SEQ ID NO: 1012
  source 1..85: mol_type = other RNA
  modified_base 1: mod_base = OTHER; note = 2'-O-methyl modified nucleotide with phosphorothioate linkage attached to cyanine3 dye
  modified_base 2: mod_base = OTHER; note = 2'-O-methyl modified nucleotide with phosphorothioate linkage
  modified_base 8: mod_base = OTHER; note = 2'-fluoro modified nucleotide
  modified_base 14: mod_base = OTHER; note = 2'-O-methyl modified nucleotide with phosphorothioate linkage
  modified_base 16: mod_base = OTHER; note = Nucleotide attached to N-acetylgalactosamine
  modified_base 24: mod_base = OTHER; note = Nucleotide with phosphorothioate linkage
  modified_base 30: mod_base = OTHER; note = 2'-fluoro modified nucleotide with phosphorothioate linkage
  modified_base 61: mod_base = OTHER; note = Nucleotide with phosphorothioate linkage
  modified_base 63: mod_base = OTHER; note = 2'-O-methyl modified nucleotide

SEQ ID NO: 1067 - RNA, 85 nt, synthetic construct; identical to SEQ ID NO: 641
  source 1..85: mol_type = other RNA
  modified_base 1: mod_base = OTHER; note = Nucleotide attached to cyanine3 dye
  modified_base 20: mod_base = OTHER; note = Nucleotide attached to N-acetylgalactosamine
  modified_base 83: mod_base = OTHER; note = 2'-fluoro modified nucleotide

SEQ ID NO: 1068 - RNA, 85 nt, synthetic construct; identical to SEQ ID NO: 641
  source 1..85: mol_type = other RNA
  modified_base 1: mod_base = OTHER; note = Nucleotide attached to cyanine3 dye
  modified_base 20: mod_base = OTHER; note = Nucleotide attached to N-acetylgalactosamine
  modified_base 84: mod_base = OTHER; note = 2'-fluoro modified nucleotide

SEQ ID NO: 1069 - RNA, 85 nt, synthetic construct; identical to SEQ ID NO: 641
  source 1..85: mol_type = other RNA
  modified_base 1: mod_base = OTHER; note = 2'-O-methyl modified nucleotide attached to cyanine3 dye
  modified_base 2: mod_base = OTHER; note = 2'-O-methyl modified nucleotide
  modified_base 3: mod_base = OTHER; note = 2'-O-methyl modified nucleotide
  modified_base 4: mod_base = OTHER; note = 2'-O-methyl modified nucleotide
  modified_base 13: mod_base = OTHER; note = 2'-O-methyl modified nucleotide
  modified_base 17: mod_base = OTHER; note = 2'-O-methyl modified nucleotide
  modified_base 18: mod_base = OTHER; note = 2'-O-methyl modified nucleotide
  modified_base 20: mod_base = OTHER; note = Nucleotide attached to N-acetylgalactosamine
  modified_base 59: mod_base = OTHER; note = 2'-O-methyl modified nucleotide
  modified_base 61: mod_base = OTHER; note = 2'-O-methyl modified nucleotide
  modified_base 75: mod_base = OTHER; note = 2'-O-methyl modified nucleotide
  modified_base 82: mod_base = OTHER; note = 2'-O-methyl modified nucleotide

SEQ ID NO: 1070 - RNA, 85 nt, synthetic construct; identical to SEQ ID NO: 641
  source 1..85: mol_type = other RNA
  modified_base 1: mod_base = OTHER; note = Nucleotide attached to cyanine3 dye
  modified_base 20: mod_base = OTHER; note = Nucleotide attached to N-acetylgalactosamine
  modified_base 85: mod_base = OTHER; note = 2'-fluoro modified nucleotide

SEQ ID NO: 1071 - RNA, 85 nt, synthetic construct; identical to SEQ ID NO: 641
  source 1..85: mol_type = other RNA
  modified_base 1: mod_base = OTHER; note = 2'-O-methyl modified nucleotide attached to cyanine3 dye
  modified_base 2: mod_base = OTHER; note = 2'-O-methyl modified nucleotide
  modified_base 3: mod_base = OTHER; note = 2'-O-methyl modified nucleotide
  modified_base 4: mod_base = OTHER; note = 2'-O-methyl modified nucleotide
  modified_base 13: mod_base = OTHER; note = 2'-O-methyl modified nucleotide
  modified_base 17: mod_base = OTHER; note = 2'-O-methyl modified nucleotide
  modified_base 18: mod_base = OTHER; note = 2'-O-methyl modified nucleotide
  modified_base 20: mod_base = OTHER; note = Nucleotide attached to N-acetylgalactosamine
  modified_base 59: mod_base = OTHER; note = 2'-O-methyl modified nucleotide
  modified_base 61: mod_base = OTHER; note = 2'-O-methyl modified nucleotide
  modified_base 82: mod_base = OTHER; note = 2'-O-methyl modified nucleotide

SEQ ID NO: 1072 - RNA, 85 nt, synthetic construct; identical to SEQ ID NO: 1012
  source 1..85: mol_type = other RNA
  modified_base 1: mod_base = OTHER; note = 2'-O-methyl modified nucleotide with phosphorothioate linkage attached to cyanine3 dye
  modified_base 2: mod_base = OTHER; note = 2'-O-methyl modified nucleotide with phosphorothioate linkage
  modified_base 20: mod_base = OTHER; note = Nucleotide attached to N-acetylgalactosamine
  modified_base 30: mod_base = OTHER; note = 2'-O-methyl modified nucleotide with phosphorothioate linkage
  modified_base 43: mod_base = OTHER; note = 2'-O-methyl modified nucleotide
  modified_base 56: mod_base = OTHER; note = 2'-O-methyl modified nucleotide with phosphorothioate linkage
  modified_base 61: mod_base = OTHER; note = 2'-fluoro modified nucleotide with phosphorothioate linkage
  modified_base 63: mod_base = OTHER; note = 2'-fluoro modified nucleotide with phosphorothioate linkage
  modified_base 82: mod_base = OTHER; note = 2'-O-methyl modified nucleotide

SEQ ID NO: 1073 - RNA, 85 nt, synthetic construct; identical to SEQ ID NO: 1012
  source 1..85: mol_type = other RNA
  modified_base 1: mod_base = OTHER; note = 2'-O-methyl modified nucleotide with phosphorothioate linkage attached to cyanine3 dye
  modified_base 2: mod_base = OTHER; note = Nucleotide with phosphorothioate linkage
  modified_base 20: mod_base = OTHER; note = Nucleotide attached to N-acetylgalactosamine
  modified_base 25: mod_base = OTHER; note = 2'-fluoro modified nucleotide with phosphorothioate linkage
  modified_base 30: mod_base = OTHER; note = Nucleotide with phosphorothioate linkage
  modified_base 52: mod_base = OTHER; note = 2'-O-methyl modified nucleotide with phosphorothioate linkage
  modified_base 58: mod_base = OTHER; note = Nucleotide with phosphorothioate linkage
  modified_base 62: mod_base = OTHER; note = 2'-O-methyl modified nucleotide
  modified_base 80: mod_base = OTHER; note = 2'-O-methyl modified nucleotide
  modified_base 83: mod_base = OTHER; note = Nucleotide with phosphorothioate linkage

SEQ ID NO: 1074 - RNA, 85 nt, synthetic construct; identical to SEQ ID NO: 1012
  source 1..85: mol_type = other RNA
  modified_base 1: mod_base = OTHER; note = 2'-O-methyl modified nucleotide with phosphorothioate linkage attached to cyanine3 dye
  modified_base 2: mod_base = OTHER; note = 2'-O-methyl modified nucleotide
  modified_base 4: mod_base = OTHER; note = 2'-O-methyl modified nucleotide
  modified_base 15: mod_base = OTHER; note = 2'-O-methyl modified nucleotide
  modified_base 17: mod_base = OTHER; note = Nucleotide with phosphorothioate linkage
  modified_base 20: mod_base = OTHER; note = Nucleotide attached to N-acetylgalactosamine
  modified_base 27: mod_base = OTHER; note = 2'-fluoro modified nucleotide
  modified_base 58: mod_base = OTHER; note = 2'-O-methyl modified nucleotide with phosphorothioate linkage
  modified_base 62: mod_base = OTHER; note = 2'-O-methyl modified nucleotide

SEQ ID NO: 1075 - RNA, 85 nt, synthetic construct; identical to SEQ ID NO: 1012
  source 1..85: mol_type = other RNA
  modified_base 1: mod_base = OTHER; note = 2'-O-methyl modified nucleotide with phosphorothioate linkage attached to cyanine3 dye
  modified_base 2: mod_base = OTHER; note = Nucleotide with phosphorothioate linkage
  modified_base 18: mod_base = OTHER; note = Nucleotide with phosphorothioate linkage
  modified_base 20: mod_base = OTHER; note = Nucleotide attached to N-acetylgalactosamine
  modified_base 24: mod_base = OTHER; note = 2'-fluoro modified nucleotide
  modified_base 37: mod_base = OTHER; note = Nucleotide with phosphorothioate linkage
  modified_base 53: mod_base = OTHER; note = 2'-O-methyl modified nucleotide
  modified_base 82: mod_base = OTHER; note = 2'-O-methyl modified nucleotide with phosphorothioate linkage

SEQ ID NO: 1076 - RNA, 85 nt, synthetic construct; identical to SEQ ID NO: 1012
  source 1..85: mol_type = other RNA
  modified_base 1: mod_base = OTHER; note = 2'-O-methyl modified nucleotide with phosphorothioate linkage attached to cyanine3 dye
  modified_base 2: mod_base = OTHER; note = 2'-O-methyl modified nucleotide with phosphorothioate linkage
  modified_base 8: mod_base = OTHER; note = 2'-fluoro modified nucleotide
  modified_base 14: mod_base = OTHER; note = 2'-O-methyl modified nucleotide with phosphorothioate linkage
  modified_base 20: mod_base = OTHER; note = Nucleotide attached to N-acetylgalactosamine
  modified_base 24: mod_base = OTHER; note = Nucleotide with phosphorothioate linkage
  modified_base 30: mod_base = OTHER; note = 2'-fluoro modified nucleotide with phosphorothioate linkage
  modified_base 61: mod_base = OTHER; note = Nucleotide with phosphorothioate linkage
  modified_base 63: mod_base = OTHER; note = 2'-O-methyl modified nucleotide

SEQ ID NO: 1077 - RNA, 85 nt, synthetic construct; identical to SEQ ID NO: 641
  source 1..85: mol_type = other RNA
  modified_base 1: mod_base = OTHER; note = Nucleotide attached to cyanine3 dye
  modified_base 46: mod_base = OTHER; note = Nucleotide attached to N-acetylgalactosamine
  modified_base 83: mod_base = OTHER; note = 2'-fluoro modified nucleotide

SEQ ID NO: 1078 - RNA, 85 nt, synthetic construct; identical to SEQ ID NO: 641
  source 1..85: mol_type = other RNA
  modified_base 1: mod_base = OTHER; note = Nucleotide attached to cyanine3 dye
  modified_base 46: mod_base = OTHER; note = Nucleotide attached to N-acetylgalactosamine
  modified_base 84: mod_base = OTHER; note = 2'-fluoro modified nucleotide

SEQ ID NO: 1079 - RNA, 85 nt, synthetic construct; identical to SEQ ID NO: 641
  source 1..85: mol_type = other RNA
  modified_base 1: mod_base = OTHER; note = 2'-O-methyl modified nucleotide attached to cyanine3 dye
  modified_base 2: mod_base = OTHER; note = 2'-O-methyl modified nucleotide
  modified_base 3: mod_base = OTHER; note = 2'-O-methyl modified nucleotide
  modified_base 4: mod_base = OTHER; note = 2'-O-methyl modified nucleotide
  modified_base 13: mod_base = OTHER; note = 2'-O-methyl modified nucleotide
  modified_base 17: mod_base = OTHER; note = 2'-O-methyl modified nucleotide
  modified_base 18: mod_base = OTHER; note = 2'-O-methyl modified nucleotide
  modified_base 46: mod_base = OTHER; note = Nucleotide attached to N-acetylgalactosamine
  modified_base 59: mod_base = OTHER; note = 2'-O-methyl modified nucleotide
  modified_base 61: mod_base = OTHER; note = 2'-O-methyl modified nucleotide
  modified_base 75: mod_base = OTHER; note = 2'-O-methyl modified nucleotide
  modified_base 82: mod_base = OTHER; note = 2'-O-methyl modified nucleotide

SEQ ID NO: 1080 - RNA, 85 nt, synthetic construct; identical to SEQ ID NO: 641
  source 1..85: mol_type = other RNA
  modified_base 1: mod_base = OTHER; note = Nucleotide attached to cyanine3 dye
  modified_base 46: mod_base = OTHER; note = Nucleotide attached to N-acetylgalactosamine
  modified_base 85: mod_base = OTHER; note = 2'-fluoro modified nucleotide

SEQ ID NO: 1081 - RNA, 85 nt, synthetic construct; identical to SEQ ID NO: 641
  source 1..85: mol_type = other RNA
  modified_base 1: mod_base = OTHER; note = 2'-O-methyl modified nucleotide attached to cyanine3 dye
  modified_base 2: mod_base = OTHER; note = 2'-O-methyl modified nucleotide
  modified_base 3: mod_base = OTHER; note = 2'-O-methyl modified nucleotide
  modified_base 4: mod_base = OTHER; note = 2'-O-methyl modified nucleotide
  modified_base 13: mod_base = OTHER; note = 2'-O-methyl modified nucleotide
  modified_base 17: mod_base = OTHER; note = 2'-O-methyl modified nucleotide
  modified_base 18: mod_base = OTHER; note = 2'-O-methyl modified nucleotide
  modified_base 46: mod_base = OTHER; note = Nucleotide attached to N-acetylgalactosamine
  modified_base 59: mod_base = OTHER; note = 2'-O-methyl modified nucleotide
  modified_base 61: mod_base = OTHER; note = 2'-O-methyl modified nucleotide
  modified_base 82: mod_base = OTHER; note = 2'-O-methyl modified nucleotide

SEQ ID NO: 1082 - RNA, 85 nt, synthetic construct; identical to SEQ ID NO: 1012
  source 1..85: mol_type = other RNA
  modified_base 1: mod_base = OTHER; note = 2'-O-methyl modified nucleotide with phosphorothioate linkage attached to cyanine3 dye
  modified_base 2: mod_base = OTHER; note = 2'-O-methyl modified nucleotide with phosphorothioate linkage
  modified_base 30: mod_base = OTHER; note = 2'-O-methyl modified nucleotide with phosphorothioate linkage
  modified_base 43: mod_base = OTHER; note = 2'-O-methyl modified nucleotide
  modified_base 46: mod_base = OTHER; note = Nucleotide attached to N-acetylgalactosamine
  modified_base 56: mod_base = OTHER; note = 2'-O-methyl modified nucleotide with phosphorothioate linkage
  modified_base 61: mod_base = OTHER; note = 2'-fluoro modified nucleotide with phosphorothioate linkage
  modified_base 63: mod_base = OTHER; note = 2'-fluoro modified nucleotide with phosphorothioate linkage
  modified_base 82: mod_base = OTHER; note = 2'-O-methyl modified nucleotide

SEQ ID NO: 1083 - RNA, 85 nt, synthetic construct; identical to SEQ ID NO: 1012
  source 1..85: mol_type = other RNA
  modified_base 1: mod_base = OTHER; note = 2'-O-methyl modified nucleotide with phosphorothioate linkage attached to cyanine3 dye
  modified_base 2: mod_base = OTHER; note = Nucleotide with phosphorothioate linkage
  modified_base 25: mod_base = OTHER; note = 2'-fluoro modified nucleotide with phosphorothioate linkage
  modified_base 30: mod_base = OTHER; note = Nucleotide with phosphorothioate linkage
  modified_base 46: mod_base = OTHER; note = Nucleotide attached to N-acetylgalactosamine
  modified_base 52: mod_base = OTHER; note = 2'-O-methyl modified nucleotide with phosphorothioate linkage
  modified_base 58: mod_base = OTHER; note = Nucleotide with phosphorothioate linkage
  modified_base 62: mod_base = OTHER; note = 2'-O-methyl modified nucleotide
  modified_base 80: mod_base = OTHER; note = 2'-O-methyl modified nucleotide
  modified_base 83: mod_base = OTHER; note = Nucleotide with phosphorothioate linkage

SEQ ID NO: 1084 - RNA, 85 nt, synthetic construct; identical to SEQ ID NO: 1012
  source 1..85: mol_type = other RNA
  modified_base 1: mod_base = OTHER; note = 2'-O-methyl modified nucleotide with phosphorothioate linkage attached to cyanine3 dye
  modified_base 2: mod_base = OTHER; note = 2'-O-methyl modified nucleotide
  modified_base 4: mod_base = OTHER; note = 2'-O-methyl modified nucleotide
  modified_base 15: mod_base = OTHER; note = 2'-O-methyl modified nucleotide
  modified_base 17: mod_base = OTHER; note = Nucleotide with phosphorothioate linkage
  modified_base 27: mod_base = OTHER; note = 2'-fluoro modified nucleotide
  modified_base 46: mod_base = OTHER; note = Nucleotide attached to N-acetylgalactosamine
  modified_base 58: mod_base = OTHER; note = 2'-O-methyl modified nucleotide with phosphorothioate linkage
  modified_base 62: mod_base = OTHER; note = 2'-O-methyl modified nucleotide

SEQ ID NO: 1085 - RNA, 85 nt, synthetic construct; identical to SEQ ID NO: 1012
  source 1..85: mol_type = other RNA
  modified_base 1: mod_base = OTHER; note = 2'-O-methyl modified nucleotide with phosphorothioate linkage attached to cyanine3 dye
  modified_base 2: mod_base = OTHER; note = Nucleotide with phosphorothioate linkage
  modified_base 18: mod_base = OTHER; note = Nucleotide with phosphorothioate linkage
  modified_base 24: mod_base = OTHER; note = 2'-fluoro modified nucleotide
  modified_base 37: mod_base = OTHER; note = Nucleotide with phosphorothioate linkage
  modified_base 46: mod_base = OTHER; note = Nucleotide attached to N-acetylgalactosamine
  modified_base 53: mod_base = OTHER; note = 2'-O-methyl modified nucleotide
  modified_base 82: mod_base = OTHER; note = 2'-O-methyl modified nucleotide with phosphorothioate linkage

SEQ ID NO: 1086 - RNA, 85 nt, synthetic construct; identical to SEQ ID NO: 1012
  source 1..85: mol_type = other RNA
  modified_base 1: mod_base = OTHER; note = 2'-O-methyl modified nucleotide with phosphorothioate linkage attached to cyanine3 dye
  modified_base 2: mod_base = OTHER; note = 2'-O-methyl modified nucleotide with phosphorothioate linkage
  modified_base 8: mod_base = OTHER; note = 2'-fluoro modified nucleotide
  modified_base 14: mod_base = OTHER; note = 2'-O-methyl modified nucleotide with phosphorothioate linkage
  modified_base 24: mod_base = OTHER; note = Nucleotide with phosphorothioate linkage
  modified_base 30: mod_base = OTHER; note = 2'-fluoro modified nucleotide with phosphorothioate linkage
  modified_base 46: mod_base = OTHER; note = Nucleotide attached to N-acetylgalactosamine
  modified_base 61: mod_base = OTHER; note = Nucleotide with phosphorothioate linkage
  modified_base 63: mod_base = OTHER; note = 2'-O-methyl modified nucleotide

SEQ ID NO: 1087 - RNA, 85 nt, synthetic construct; identical to SEQ ID NO: 641
  source 1..85: mol_type = other RNA
  modified_base 16: mod_base = OTHER; note = Nucleotide attached to AN1 (C6-U phosphoramidite (5'-Dimethoxytrityl-5-[N-(trifluoroacetylaminohexyl)-3-acry limido]-Uridine, 2'-O-triisopropylsilyloxymethyl-3'-[(2-cyanoethyl)-(N,N-dii sopropyl)]-phosphoramidite))
  modified_base 83: mod_base = OTHER; note = 2'-fluoro modified nucleotide

SEQ ID NO: 1088 - RNA, 85 nt, synthetic construct; identical to SEQ ID NO: 641
  source 1..85: mol_type = other RNA
  modified_base 16: mod_base = OTHER; note = Nucleotide attached to AN1 (C6-U phosphoramidite (5'-Dimethoxytrityl-5-[N-(trifluoroacetylaminohexyl)-3-acry limido]-Uridine, 2'-O-triisopropylsilyloxymethyl-3'-[(2-cyanoethyl)-(N,N-dii sopropyl)]-phosphoramidite))
  modified_base 84: mod_base = OTHER; note = 2'-fluoro modified nucleotide

SEQ ID NO: 1089 - RNA, 85 nt, synthetic construct; identical to SEQ ID NO: 641
  source 1..85: mol_type = other RNA
  modified_base 1: mod_base = OTHER; note = 2'-O-methyl modified nucleotide
  modified_base 2: mod_base = OTHER; note = 2'-O-methyl modified nucleotide
  modified_base 3: mod_base = OTHER; note = 2'-O-methyl modified nucleotide
  modified_base 4: mod_base = OTHER; note = 2'-O-methyl modified nucleotide
  modified_base 13: mod_base = OTHER; note = 2'-O-methyl modified nucleotide
  modified_base 16: mod_base = OTHER; note = Nucleotide attached to AN1 (C6-U phosphoramidite (5'-Dimethoxytrityl-5-[N-(trifluoroacetylaminohexyl)-3-acry limido]-Uridine, 2'-O-triisopropylsilyloxymethyl-3'-[(2-cyanoethyl)-(N,N-dii sopropyl)]-phosphoramidite))
  modified_base 17: mod_base = OTHER; note = 2'-O-methyl modified nucleotide
  modified_base 18: mod_base = OTHER; note = 2'-O-methyl modified nucleotide
  modified_base 59: mod_base = OTHER; note = 2'-O-methyl modified nucleotide
  modified_base 61: mod_base = OTHER; note = 2'-O-methyl modified nucleotide
  modified_base 75: mod_base = OTHER; note = 2'-O-methyl modified nucleotide
  modified_base 82: mod_base = OTHER; note = 2'-O-methyl modified nucleotide

SEQ ID NO: 1090 - RNA, 85 nt, synthetic construct; identical to SEQ ID NO: 641
  source 1..85: mol_type = other RNA
  modified_base 16: mod_base = OTHER; note = Nucleotide attached to AN1 (C6-U phosphoramidite (5'-Dimethoxytrityl-5-[N-(trifluoroacetylaminohexyl)-3-acry limido]-Uridine, 2'-O-triisopropylsilyloxymethyl-3'-[(2-cyanoethyl)-(N,N-dii sopropyl)]-phosphoramidite))
  modified_base 85: mod_base = OTHER; note = 2'-fluoro modified nucleotide

SEQ ID NO: 1091 - RNA, 85 nt, synthetic construct; identical to SEQ ID NO: 641
  source 1..85: mol_type = other RNA
  modified_base 1: mod_base = OTHER; note = 2'-O-methyl modified nucleotide
  modified_base 2: mod_base = OTHER; note = 2'-O-methyl modified nucleotide
  modified_base 3: mod_base = OTHER; note = 2'-O-methyl modified nucleotide
  modified_base 4: mod_base = OTHER; note = 2'-O-methyl modified nucleotide
  modified_base 13: mod_base = OTHER; note = 2'-O-methyl modified nucleotide
  modified_base 16: mod_base = OTHER; note = Nucleotide attached to AN1 (C6-U phosphoramidite (5'-Dimethoxytrityl-5-[N-(trifluoroacetylaminohexyl)-3-acry limido]-Uridine, 2'-O-triisopropylsilyloxymethyl-3'-[(2-cyanoethyl)-(N,N-dii sopropyl)]-phosphoramidite))
  modified_base 17: mod_base = OTHER; note = 2'-O-methyl modified nucleotide
  modified_base 18: mod_base = OTHER; note = 2'-O-methyl modified nucleotide
  modified_base 59: mod_base = OTHER; note = 2'-O-methyl modified nucleotide
  modified_base 61: mod_base = OTHER; note = 2'-O-methyl modified nucleotide
  modified_base 82: mod_base = OTHER; note = 2'-O-methyl modified nucleotide

SEQ ID NO: 1092 - RNA, 85 nt, synthetic construct; identical to SEQ ID NO: 1012
  source 1..85: mol_type = other RNA
  modified_base 1: mod_base = OTHER; note = 2'-O-methyl modified nucleotide with phosphorothioate linkage
  modified_base 2: mod_base = OTHER; note = 2'-O-methyl modified nucleotide with phosphorothioate linkage
  modified_base 16: mod_base = OTHER; note = Nucleotide attached to AN1 (C6-U phosphoramidite (5'-Dimethoxytrityl-5-[N-(trifluoroacetylaminohexyl)-3-acry limido]-Uridine, 2'-O-triisopropylsilyloxymethyl-3'-[(2-cyanoethyl)-(N,N-dii sopropyl)]-phosphoramidite))
  modified_base 30: mod_base = OTHER; note = 2'-O-methyl modified nucleotide with phosphorothioate linkage
  modified_base 43: mod_base = OTHER; note = 2'-O-methyl modified nucleotide
  modified_base 56: mod_base = OTHER; note = 2'-O-methyl modified nucleotide with phosphorothioate linkage
  modified_base 61: mod_base = OTHER; note = 2'-fluoro modified nucleotide with phosphorothioate linkage
  modified_base 63: mod_base = OTHER; note = 2'-fluoro modified nucleotide with phosphorothioate linkage
  modified_base 82: mod_base = OTHER; note = 2'-O-methyl modified nucleotide

SEQ ID NO: 1093 - RNA, 85 nt, synthetic construct; identical to SEQ ID NO: 1012
  source 1..85: mol_type = other RNA
  modified_base 1: mod_base = OTHER; note = 2'-O-methyl modified nucleotide with phosphorothioate linkage
  modified_base 2: mod_base = OTHER; note = Nucleotide with phosphorothioate linkage
  modified_base 16: mod_base = OTHER; note = Nucleotide attached to AN1 (C6-U phosphoramidite (5'-Dimethoxytrityl-5-[N-(trifluoroacetylaminohexyl)-3-acry limido]-Uridine, 2'-O-triisopropylsilyloxymethyl-3'-[(2-cyanoethyl)-(N,N-dii sopropyl)]-phosphoramidite))
  modified_base 25: mod_base = OTHER; note = 2'-fluoro modified nucleotide with phosphorothioate linkage
  modified_base 30: mod_base = OTHER; note = Nucleotide with phosphorothioate linkage
  modified_base 52: mod_base = OTHER; note = 2'-O-methyl modified nucleotide with phosphorothioate linkage
  modified_base 58: mod_base = OTHER; note = Nucleotide with phosphorothioate linkage
  modified_base 62: mod_base = OTHER; note = 2'-O-methyl modified nucleotide
  modified_base 80: mod_base = OTHER; note = 2'-O-methyl modified nucleotide
  modified_base 83: mod_base = OTHER; note = Nucleotide with phosphorothioate linkage

SEQ ID NO: 1094 - RNA, 85 nt, synthetic construct; identical to SEQ ID NO: 1012
  source 1..85: mol_type = other RNA
  modified_base 1: mod_base = OTHER; note = 2'-O-methyl modified nucleotide with phosphorothioate linkage
  modified_base 2: mod_base = OTHER; note = 2'-O-methyl modified nucleotide
  modified_base 4: mod_base = OTHER; note = 2'-O-methyl modified nucleotide
  modified_base 15: mod_base = OTHER; note = 2'-O-methyl modified nucleotide
  modified_base 16: mod_base = OTHER; note = Nucleotide attached to AN1 (C6-U phosphoramidite (5'-Dimethoxytrityl-5-[N-(trifluoroacetylaminohexyl)-3-acry limido]-Uridine, 2'-O-triisopropylsilyloxymethyl-3'-[(2-cyanoethyl)-(N,N-dii sopropyl)]-phosphoramidite))
  modified_base 17: mod_base = OTHER; note = Nucleotide with phosphorothioate linkage
  modified_base 27: mod_base = OTHER; note = 2'-fluoro modified nucleotide
  modified_base 58: mod_base = OTHER; note = 2'-O-methyl modified nucleotide with phosphorothioate linkage
  modified_base 62: mod_base = OTHER; note = 2'-O-methyl modified nucleotide

SEQ ID NO: 1095 - RNA, 85 nt, synthetic construct; identical to SEQ ID NO: 1012
  source 1..85: mol_type = other RNA
  modified_base 1: mod_base = OTHER; note = 2'-O-methyl modified nucleotide with phosphorothioate linkage
  modified_base 2: mod_base = OTHER; note = Nucleotide with phosphorothioate linkage
  modified_base 16: mod_base = OTHER; note = Nucleotide attached to AN1 (C6-U phosphoramidite (5'-Dimethoxytrityl-5-[N-(trifluoroacetylaminohexyl)-3-acry limido]-Uridine, 2'-O-triisopropylsilyloxymethyl-3'-[(2-cyanoethyl)-(N,N-dii sopropyl)]-phosphoramidite))
  modified_base 18: mod_base = OTHER; note = Nucleotide with phosphorothioate linkage
  modified_base 24: mod_base = OTHER; note = 2'-fluoro modified nucleotide
  modified_base 37: mod_base = OTHER; note = Nucleotide with phosphorothioate linkage
  modified_base 53: mod_base = OTHER; note = 2'-O-methyl modified nucleotide
  modified_base 82: mod_base = OTHER; note = 2'-O-methyl modified nucleotide with phosphorothioate linkage

SEQ ID NO: 1096 - RNA, 85 nt, synthetic construct; identical to SEQ ID NO: 1012
  source 1..85: mol_type = other RNA
  modified_base 1: mod_base = OTHER; note = 2'-O-methyl modified nucleotide with phosphorothioate linkage
  modified_base 2: mod_base = OTHER; note = 2'-O-methyl modified nucleotide with phosphorothioate linkage
  modified_base 8: mod_base = OTHER; note = 2'-fluoro modified nucleotide
  modified_base 14: mod_base = OTHER; note = 2'-O-methyl modified nucleotide with phosphorothioate linkage
  modified_base 16: mod_base = OTHER; note = Nucleotide attached to AN1 (C6-U phosphoramidite (5'-Dimethoxytrityl-5-[N-(trifluoroacetylaminohexyl)-3-acry limido]-Uridine, 2'-O-triisopropylsilyloxymethyl-3'-[(2-cyanoethyl)-(N,N-dii sopropyl)]-phosphoramidite))
  modified_base 24: mod_base = OTHER; note = Nucleotide with phosphorothioate linkage
  modified_base 30: mod_base = OTHER; note = 2'-fluoro modified nucleotide with phosphorothioate linkage
  modified_base 61: mod_base = OTHER; note = Nucleotide with phosphorothioate linkage
  modified_base 63: mod_base = OTHER; note = 2'-O-methyl modified nucleotide

SEQ ID NO: 1097 - RNA, 85 nt, synthetic construct; identical to SEQ ID NO: 641
  source 1..85: mol_type = other RNA
  modified_base 20: mod_base = OTHER; note = Nucleotide attached to AN1 (C6-U phosphoramidite (5'-Dimethoxytrityl-5-[N-(trifluoroacetylaminohexyl)-3-acry limido]-Uridine, 2'-O-triisopropylsilyloxymethyl-3'-[(2-cyanoethyl)-(N,N-dii sopropyl)]-phosphoramidite))
  modified_base 83: mod_base = OTHER; note = 2'-fluoro modified nucleotide

SEQ ID NO: 1098 - RNA, 85 nt, synthetic construct; identical to SEQ ID NO: 641
  source 1..85: mol_type = other RNA
  modified_base 20: mod_base = OTHER; note = Nucleotide attached to AN1 (C6-U phosphoramidite (5'-Dimethoxytrityl-5-[N-(trifluoroacetylaminohexyl)-3-acry limido]-Uridine, 2'-O-triisopropylsilyloxymethyl-3'-[(2-cyanoethyl)-(N,N-dii sopropyl)]-phosphoramidite))
  modified_base 84: mod_base = OTHER; note = 2'-fluoro modified nucleotide

SEQ ID NO: 1099 - RNA, 85 nt, synthetic construct; identical to SEQ ID NO: 641
  source 1..85: mol_type = other RNA
  modified_base 1: mod_base = OTHER; note = 2'-O-methyl modified nucleotide
  modified_base 2: mod_base = OTHER; note = 2'-O-methyl modified nucleotide
  modified_base 3: mod_base = OTHER; note = 2'-O-methyl modified nucleotide
  modified_base 4: mod_base = OTHER; note = 2'-O-methyl modified nucleotide
  modified_base 13: mod_base = OTHER; note = 2'-O-methyl modified nucleotide
  modified_base 17: mod_base = OTHER; note = 2'-O-methyl modified nucleotide
  modified_base 18: mod_base = OTHER; note = 2'-O-methyl modified nucleotide
  modified_base 20: mod_base = OTHER; note = Nucleotide attached to AN1 (C6-U phosphoramidite (5'-Dimethoxytrityl-5-[N-(trifluoroacetylaminohexyl)-3-acry limido]-Uridine, 2'-O-triisopropylsilyloxymethyl-3'-[(2-cyanoethyl)-(N,N-dii sopropyl)]-phosphoramidite))
  modified_base 59: mod_base = OTHER; note = 2'-O-methyl modified nucleotide
  modified_base 61: mod_base = OTHER; note = 2'-O-methyl modified nucleotide
  modified_base 75: mod_base = OTHER; note = 2'-O-methyl modified nucleotide
  modified_base 82: mod_base = OTHER; note = 2'-O-methyl modified nucleotide

SEQ ID NO: 1100 - RNA, 85 nt, synthetic construct; identical to SEQ ID NO: 641
  source 1..85: mol_type = other RNA
  modified_base 20: mod_base = OTHER; note = Nucleotide attached to AN1 (C6-U phosphoramidite (5'-Dimethoxytrityl-5-[N-(trifluoroacetylaminohexyl)-3-acry limido]-Uridine, 2'-O-triisopropylsilyloxymethyl-3'-[(2-cyanoethyl)-(N,N-dii sopropyl)]-phosphoramidite))
  modified_base 85: mod_base = OTHER; note = 2'-fluoro modified nucleotide

SEQ ID NO: 1101 - RNA, 85 nt, synthetic construct; identical to SEQ ID NO: 641
  source 1..85: mol_type = other RNA
  modified_base 1: mod_base = OTHER; note = 2'-O-methyl modified nucleotide
  modified_base 2: mod_base = OTHER; note = 2'-O-methyl modified nucleotide
  modified_base 3: mod_base = OTHER; note = 2'-O-methyl modified nucleotide
  modified_base 4: mod_base = OTHER; note = 2'-O-methyl modified nucleotide
  modified_base 13: mod_base = OTHER; note = 2'-O-methyl modified nucleotide
  modified_base 17: mod_base = OTHER; note = 2'-O-methyl modified nucleotide
  modified_base 18: mod_base = OTHER; note = 2'-O-methyl modified nucleotide
  modified_base 20: mod_base = OTHER; note = Nucleotide attached to AN1 (C6-U phosphoramidite (5'-Dimethoxytrityl-5-[N-(trifluoroacetylaminohexyl)-3-acry limido]-Uridine, 2'-O-triisopropylsilyloxymethyl-3'-[(2-cyanoethyl)-(N,N-dii sopropyl)]-phosphoramidite))
  modified_base 59: mod_base = OTHER; note = 2'-O-methyl modified nucleotide
  modified_base 61: mod_base = OTHER; note = 2'-O-methyl modified nucleotide
  modified_base 82: mod_base = OTHER; note = 2'-O-methyl modified nucleotide

SEQ ID NO: 1102 - RNA, 85 nt, synthetic construct; identical to SEQ ID NO: 1012
  source 1..85: mol_type = other RNA
  modified_base 1: mod_base = OTHER; note = 2'-O-methyl modified nucleotide with phosphorothioate linkage
  modified_base 2: mod_base = OTHER; note = 2'-O-methyl modified nucleotide with phosphorothioate linkage
  modified_base 20: mod_base = OTHER; note = Nucleotide attached to AN1 (C6-U phosphoramidite (5'-Dimethoxytrityl-5-[N-(trifluoroacetylaminohexyl)-3-acry limido]-Uridine, 2'-O-triisopropylsilyloxymethyl-3'-[(2-cyanoethyl)-(N,N-dii sopropyl)]-phosphoramidite))
  modified_base 30: mod_base = OTHER; note = 2'-O-methyl modified nucleotide with phosphorothioate linkage
  modified_base 43: mod_base = OTHER; note = 2'-O-methyl modified nucleotide
  modified_base 56: mod_base = OTHER; note = 2'-O-methyl modified nucleotide with phosphorothioate linkage
  modified_base 61: mod_base = OTHER; note = 2'-fluoro modified nucleotide with phosphorothioate linkage
  modified_base 63: mod_base = OTHER; note = 2'-fluoro modified nucleotide with phosphorothioate linkage
  modified_base 82: mod_base = OTHER; note = 2'-O-methyl modified nucleotide

SEQ ID NO: 1103 - RNA, 85 nt, synthetic construct; identical to SEQ ID NO: 1012
  source 1..85: mol_type = other RNA
  modified_base 1: mod_base = OTHER; note = 2'-O-methyl modified nucleotide with phosphorothioate linkage
  modified_base 2: mod_base = OTHER; note = Nucleotide with phosphorothioate linkage
  modified_base 20: mod_base = OTHER; note = Nucleotide attached to AN1 (C6-U phosphoramidite (5'-Dimethoxytrityl-5-[N-(trifluoroacetylaminohexyl)-3-acry limido]-Uridine, 2'-O-triisopropylsilyloxymethyl-3'-[(2-cyanoethyl)-(N,N-dii sopropyl)]-phosphoramidite))
  modified_base 25: mod_base = OTHER; note = 2'-fluoro modified nucleotide with phosphorothioate linkage
  modified_base 30: mod_base = OTHER; note = Nucleotide with phosphorothioate linkage
  modified_base 52: mod_base = OTHER; note = 2'-O-methyl modified nucleotide with phosphorothioate linkage
  modified_base 58: mod_base = OTHER; note = Nucleotide with phosphorothioate linkage
  modified_base 62: mod_base = OTHER; note = 2'-O-methyl modified nucleotide
  modified_base 80: mod_base = OTHER; note = 2'-O-methyl modified nucleotide
  modified_base 83: mod_base = OTHER; note = Nucleotide with phosphorothioate linkage

SEQ ID NO: 1104 - RNA, 85 nt, synthetic construct; identical to SEQ ID NO: 1012
  source 1..85: mol_type = other RNA
  modified_base 1: mod_base = OTHER; note = 2'-O-methyl modified nucleotide with phosphorothioate linkage
  modified_base 2: mod_base = OTHER; note = 2'-O-methyl modified nucleotide
  modified_base 4: mod_base = OTHER; note = 2'-O-methyl modified nucleotide
  modified_base 15: mod_base = OTHER; note = 2'-O-methyl modified nucleotide
  modified_base 17: mod_base = OTHER; note = Nucleotide with phosphorothioate linkage
  modified_base 20: mod_base = OTHER; note = Nucleotide attached to AN1 (C6-U phosphoramidite (5'-Dimethoxytrityl-5-[N-(trifluoroacetylaminohexyl)-3-acry limido]-Uridine, 2'-O-triisopropylsilyloxymethyl-3'-[(2-cyanoethyl)-(N,N-dii sopropyl)]-phosphoramidite))
  modified_base 27: mod_base = OTHER; note = 2'-fluoro modified nucleotide
  modified_base 58: mod_base = OTHER; note = 2'-O-methyl modified nucleotide with phosphorothioate linkage
  modified_base 62: mod_base = OTHER; note = 2'-O-methyl modified nucleotide

SEQ ID NO: 1105 - RNA, 85 nt, synthetic construct; identical to SEQ ID NO: 1012
  source 1..85: mol_type = other RNA
  modified_base 1: mod_base = OTHER; note = 2'-O-methyl modified nucleotide with phosphorothioate linkage
  modified_base 2: mod_base = OTHER; note = Nucleotide with phosphorothioate linkage
  modified_base 18: mod_base = OTHER; note = Nucleotide with phosphorothioate linkage
  modified_base 20: mod_base = OTHER; note = Nucleotide attached to AN1 (C6-U phosphoramidite (5'-Dimethoxytrityl-5-[N-(trifluoroacetylaminohexyl)-3-acry limido]-Uridine, 2'-O-triisopropylsilyloxymethyl-3'-[(2-cyanoethyl)-(N,N-dii sopropyl)]-phosphoramidite))
  modified_base 24: mod_base = OTHER; note = 2'-fluoro modified nucleotide
  modified_base 37: mod_base = OTHER; note = Nucleotide with phosphorothioate linkage
  modified_base 53: mod_base = OTHER; note = 2'-O-methyl modified nucleotide
  modified_base 82: mod_base = OTHER; note = 2'-O-methyl modified nucleotide with phosphorothioate linkage

SEQ ID NO: 1106 - RNA, 85 nt, synthetic construct; identical to SEQ ID NO: 1012
  source 1..85: mol_type = other RNA
  modified_base 1: mod_base = OTHER; note = 2'-O-methyl modified nucleotide with phosphorothioate linkage
  modified_base 2: mod_base = OTHER; note = 2'-O-methyl modified nucleotide with phosphorothioate linkage
  modified_base 8: mod_base = OTHER; note = 2'-fluoro modified nucleotide
  modified_base 14: mod_base = OTHER; note = 2'-O-methyl modified nucleotide with phosphorothioate linkage
  modified_base 20: mod_base = OTHER; note = Nucleotide attached to AN1 (C6-U phosphoramidite (5'-Dimethoxytrityl-5-[N-(trifluoroacetylaminohexyl)-3-acry limido]-Uridine, 2'-O-triisopropylsilyloxymethyl-3'-[(2-cyanoethyl)-(N,N-dii sopropyl)]-phosphoramidite))
  modified_base 24: mod_base = OTHER; note = Nucleotide with phosphorothioate linkage
  modified_base 30: mod_base = OTHER; note = 2'-fluoro modified nucleotide with phosphorothioate linkage
  modified_base 61: mod_base = OTHER; note = Nucleotide with phosphorothioate linkage
  modified_base 63: mod_base = OTHER; note = 2'-O-methyl modified nucleotide

SEQ ID NO: 1107 - RNA, 85 nt, synthetic construct; identical to SEQ ID NO: 641
  source 1..85: mol_type = other RNA
  modified_base 46: mod_base = OTHER; note = Nucleotide attached to AN1 (C6-U phosphoramidite (5'-Dimethoxytrityl-5-[N-(trifluoroacetylaminohexyl)-3-acry limido]-Uridine, 2'-O-triisopropylsilyloxymethyl-3'-[(2-cyanoethyl)-(N,N-dii sopropyl)]-phosphoramidite))
  modified_base 83: mod_base = OTHER; note = 2'-fluoro modified nucleotide

SEQ ID NO: 1108 - RNA, 85 nt, synthetic construct; identical to SEQ ID NO: 641
  source 1..85: mol_type = other RNA
  modified_base 46: mod_base = OTHER; note = Nucleotide attached to AN1 (C6-U phosphoramidite (5'-Dimethoxytrityl-5-[N-(trifluoroacetylaminohexyl)-3-acry limido]-Uridine, 2'-O-triisopropylsilyloxymethyl-3'-[(2-cyanoethyl)-(N,N-dii sopropyl)]-phosphoramidite))
  modified_base 84: mod_base = OTHER; note = 2'-fluoro modified nucleotide

SEQ ID NO: 1109 - RNA, 85 nt, synthetic construct; identical to SEQ ID NO: 641
  source 1..85: mol_type = other RNA
  modified_base 1: mod_base = OTHER; note = 2'-O-methyl modified nucleotide
  modified_base 2: mod_base = OTHER; note = 2'-O-methyl modified nucleotide
  modified_base 3: mod_base = OTHER; note = 2'-O-methyl modified nucleotide
  modified_base 4: mod_base = OTHER; note = 2'-O-methyl modified nucleotide
  modified_base 13: mod_base = OTHER; note = 2'-O-methyl modified nucleotide
  modified_base 17: mod_base = OTHER; note = 2'-O-methyl modified nucleotide
  modified_base 18: mod_base = OTHER; note = 2'-O-methyl modified nucleotide
  modified_base 46: mod_base = OTHER; note = Nucleotide attached to AN1 (C6-U phosphoramidite (5'-Dimethoxytrityl-5-[N-(trifluoroacetylaminohexyl)-3-acry limido]-Uridine, 2'-O-triisopropylsilyloxymethyl-3'-[(2-cyanoethyl)-(N,N-dii sopropyl)]-phosphoramidite))
  modified_base 59: mod_base = OTHER; note = 2'-O-methyl modified nucleotide
  modified_base 61: mod_base = OTHER; note = 2'-O-methyl modified nucleotide
  modified_base 75: mod_base = OTHER; note = 2'-O-methyl modified nucleotide
  modified_base 82: mod_base = OTHER; note = 2'-O-methyl modified nucleotide

SEQ ID NO: 1110 - RNA, 85 nt, synthetic construct; identical to SEQ ID NO: 641
  source 1..85: mol_type = other RNA
  modified_base 46: mod_base = OTHER; note = Nucleotide attached to AN1 (C6-U phosphoramidite (5'-Dimethoxytrityl-5-[N-(trifluoroacetylaminohexyl)-3-acry limido]-Uridine, 2'-O-triisopropylsilyloxymethyl-3'-[(2-cyanoethyl)-(N,N-dii sopropyl)]-phosphoramidite))
  modified_base 85: mod_base = OTHER; note = 2'-fluoro modified nucleotide

SEQ ID NO: 1111 - RNA, 85 nt, synthetic construct; identical to SEQ ID NO: 641
  source 1..85: mol_type = other RNA
  modified_base 1: mod_base = OTHER; note = 2'-O-methyl modified nucleotide
  modified_base 2: mod_base = OTHER; note = 2'-O-methyl modified nucleotide
  modified_base 3: mod_base = OTHER; note = 2'-O-methyl modified nucleotide
  modified_base 4: mod_base = OTHER; note = 2'-O-methyl modified nucleotide
  modified_base 13: mod_base = OTHER; note = 2'-O-methyl modified nucleotide
  modified_base 17: mod_base = OTHER; note = 2'-O-methyl modified nucleotide
  modified_base 18: mod_base = OTHER; note = 2'-O-methyl modified nucleotide
  modified_base 46: mod_base = OTHER; note = Nucleotide attached to AN1 (C6-U phosphoramidite (5'-Dimethoxytrityl-5-[N-(trifluoroacetylaminohexyl)-3-acry limido]-Uridine, 2'-O-triisopropylsilyloxymethyl-3'-[(2-cyanoethyl)-(N,N-dii sopropyl)]-phosphoramidite))
  modified_base 59: mod_base = OTHER; note = 2'-O-methyl modified nucleotide
  modified_base 61: mod_base = OTHER; note = 2'-O-methyl modified nucleotide
  modified_base 82: mod_base = OTHER; note = 2'-O-methyl modified nucleotide

SEQ ID NO: 1112 - RNA, 85 nt, synthetic construct; identical to SEQ ID NO: 1012
  source 1..85: mol_type = other RNA
  modified_base 1: mod_base = OTHER; note = 2'-O-methyl modified nucleotide with phosphorothioate linkage
  modified_base 2: mod_base = OTHER; note = 2'-O-methyl modified nucleotide with phosphorothioate linkage
  modified_base 30: mod_base = OTHER; note = 2'-O-methyl modified nucleotide with phosphorothioate linkage
  modified_base 43: mod_base = OTHER; note = 2'-O-methyl modified nucleotide
  modified_base 46: mod_base = OTHER; note = Nucleotide attached to AN1 (C6-U phosphoramidite (5'-Dimethoxytrityl-5-[N-(trifluoroacetylaminohexyl)-3-acry limido]-Uridine, 2'-O-triisopropylsilyloxymethyl-3'-[(2-cyanoethyl)-(N,N-dii sopropyl)]-phosphoramidite))
  modified_base 56: mod_base = OTHER; note = 2'-O-methyl modified nucleotide with phosphorothioate linkage
  modified_base 61: mod_base = OTHER; note = 2'-fluoro modified nucleotide with phosphorothioate linkage
  modified_base 63: mod_base = OTHER; note = 2'-fluoro modified nucleotide with phosphorothioate linkage
  modified_base 82: mod_base = OTHER; note = 2'-O-methyl modified nucleotide

SEQ ID NO: 1113 - RNA, 85 nt, synthetic construct; identical to SEQ ID NO: 1012
  source 1..85: mol_type = other RNA
  modified_base 1: mod_base = OTHER; note = 2'-O-methyl modified nucleotide with phosphorothioate linkage
  modified_base 2: mod_base = OTHER; note = Nucleotide with phosphorothioate linkage
  modified_base 25: mod_base = OTHER; note = 2'-fluoro modified nucleotide with phosphorothioate linkage
  modified_base 30: mod_base = OTHER; note = Nucleotide with phosphorothioate linkage
  modified_base 46: mod_base = OTHER; note = Nucleotide attached to AN1 (C6-U phosphoramidite (5'-Dimethoxytrityl-5-[N-(trifluoroacetylaminohexyl)-3-acry limido]-Uridine, 2'-O-triisopropylsilyloxymethyl-3'-[(2-cyanoethyl)-(N,N-dii sopropyl)]-phosphoramidite))
  modified_base 52: mod_base = OTHER; note = 2'-O-methyl modified nucleotide with phosphorothioate linkage
  modified_base 58: mod_base = OTHER; note = Nucleotide with phosphorothioate linkage
  modified_base 62: mod_base = OTHER; note = 2'-O-methyl modified nucleotide
  modified_base 80: mod_base = OTHER; note = 2'-O-methyl modified nucleotide
  modified_base 83: mod_base = OTHER; note = Nucleotide with phosphorothioate linkage

SEQ ID NO: 1114 - RNA, 85 nt, synthetic construct; identical to SEQ ID NO: 1012
  source 1..85: mol_type = other RNA
  modified_base 1: mod_base = OTHER; note = 2'-O-methyl modified nucleotide with phosphorothioate linkage
  modified_base 2: mod_base = OTHER; note = 2'-O-methyl modified nucleotide
  modified_base 4: mod_base = OTHER; note = 2'-O-methyl modified nucleotide
  modified_base 15: mod_base = OTHER; note = 2'-O-methyl modified nucleotide
  modified_base 17: mod_base = OTHER; note = Nucleotide with phosphorothioate linkage
  modified_base 27: mod_base = OTHER; note = 2'-fluoro modified nucleotide
  modified_base 46: mod_base = OTHER; note = Nucleotide attached to AN1 (C6-U phosphoramidite (5'-Dimethoxytrityl-5-[N-(trifluoroacetylaminohexyl)-3-acry limido]-Uridine, 2'-O-triisopropylsilyloxymethyl-3'-[(2-cyanoethyl)-(N,N-dii sopropyl)]-phosphoramidite))
  modified_base 58: mod_base = OTHER; note = 2'-O-methyl modified nucleotide with phosphorothioate linkage
  modified_base 62: mod_base = OTHER; note = 2'-O-methyl modified nucleotide

SEQ ID NO: 1115 - RNA, 85 nt, synthetic construct; identical to SEQ ID NO: 1012
  source 1..85: mol_type = other RNA
  modified_base 1: mod_base = OTHER; note = 2'-O-methyl modified nucleotide with phosphorothioate linkage
  modified_base 2: mod_base = OTHER; note = Nucleotide with phosphorothioate linkage
  modified_base 18: mod_base = OTHER; note = Nucleotide with phosphorothioate linkage
  modified_base 24: mod_base = OTHER; note = 2'-fluoro modified nucleotide
  modified_base 37: mod_base = OTHER; note = Nucleotide with phosphorothioate linkage
  modified_base 46: mod_base = OTHER; note = Nucleotide attached to AN1 (C6-U phosphoramidite (5'-Dimethoxytrityl-5-[N-(trifluoroacetylaminohexyl)-3-acry limido]-Uridine, 2'-O-triisopropylsilyloxymethyl-3'-[(2-cyanoethyl)-(N,N-dii sopropyl)]-phosphoramidite))
  modified_base 53: mod_base = OTHER; note = 2'-O-methyl modified nucleotide
  modified_base 82: mod_base = OTHER; note = 2'-O-methyl modified nucleotide with phosphorothioate linkage

SEQ ID NO: 1116 - RNA, 85 nt, synthetic construct; identical to SEQ ID NO: 1012
  source 1..85: mol_type = other RNA
  modified_base 1: mod_base = OTHER; note = 2'-O-methyl modified nucleotide with phosphorothioate linkage
  modified_base 2: mod_base = OTHER; note = 2'-O-methyl modified nucleotide with phosphorothioate linkage
  modified_base 8: mod_base = OTHER; note = 2'-fluoro modified nucleotide
  modified_base 14: mod_base = OTHER; note = 2'-O-methyl modified nucleotide with phosphorothioate linkage
  modified_base 24: mod_base = OTHER; note = Nucleotide with phosphorothioate linkage
  modified_base 30: mod_base = OTHER; note = 2'-fluoro modified nucleotide with phosphorothioate linkage
  modified_base 46: mod_base = OTHER; note = Nucleotide attached to AN1 (C6-U phosphoramidite (5'-Dimethoxytrityl-5-[N-(trifluoroacetylaminohexyl)-3-acry limido]-Uridine, 2'-O-triisopropylsilyloxymethyl-3'-[(2-cyanoethyl)-(N,N-dii sopropyl)]-phosphoramidite))
  modified_base 61: mod_base = OTHER; note = Nucleotide with phosphorothioate linkage
  modified_base 63: mod_base = OTHER; note = 2'-O-methyl modified nucleotide

SEQ ID NO: 1117-1199 - skipped (83 entries)

SEQ ID NO: 1200 - DNA, 73 bp, synthetic construct; identical to SEQ ID NO: 4
  source 1..73: mol_type = other DNA

SEQ ID NO: 1201 - DNA, 72 bp, synthetic construct; identical to SEQ ID NO: 17
  source 1..72: mol_type = other DNA

SEQ ID NO: 1202 - DNA, 72 bp, synthetic construct
  source 1..72: mol_type = other DNA
gggggtgtagctcagtggtagagcgcatgctttgcatgtatgaggccccgggttcgatccccggcacctcca

SEQ ID NO: 1203 - DNA, 73 bp, synthetic construct; identical to SEQ ID NO: 28
  source 1..73: mol_type = other DNA

SEQ ID NO: 1204 - DNA, 73 bp, synthetic construct; identical to SEQ ID NO: 30
  source 1..73: mol_type = other DNA

SEQ ID NO: 1205 - DNA, 73 bp, synthetic construct; identical to SEQ ID NO: 32
  source 1..73: mol_type = other DNA

SEQ ID NO: 1206 - DNA, 73 bp, synthetic construct
  source 1..73: mol_type = other DNA
gaccgcgtggcctaatggataaggcgtctgacttcggatcagaagattgagggttcgagtccctccgtggtcg

SEQ ID NO: 1207 - DNA, 74 bp, synthetic construct
  source 1..74: mol_type = other DNA
  misc_difference 21: note = a, c, t, g, unknown or other
  misc_difference 65: note = a, c, t, g, unknown or other
ggctctgtggcgcaatggatnagcgcattggacttctaattcaaaggttgcgggttcgagtcccnccagagtcg

SEQ ID NO: 1208 - DNA, 75 bp, synthetic construct
  source 1..75: mol_type = other DNA
  misc_difference 43: note = a, c, t, g, unknown or other
gtctctgtggcgcaatcggttagcgcgttcggctgttaaccgnaaaggttggtggttcgagcccacccagggacg

SEQ ID NO: 1209 - DNA, 72 bp, synthetic construct; identical to SEQ ID NO: 62
  source 1..72: mol_type = other DNA

SEQ ID NO: 1210 - DNA, 73 bp, synthetic construct
  source 1..73: mol_type = other DNA
  misc_difference 16: note = a, c, t, g, unknown or other
gggggtatagctcagngggtagagcatttgactgcagatcaagaggtccccggttcaaatccgggtgccccct

SEQ ID NO: 1211 - DNA, 72 bp, synthetic construct
  source 1..72: mol_type = other DNA
  misc_difference 20: note = a, c, t, g, unknown or other
ggttccatggtgtaatggtnagcactctggactctgaatccagcgatccgagttcaagtctcggtggaacct

SEQ ID NO: 1212 - DNA, 72 bp, synthetic construct; identical to SEQ ID NO: 94
  source 1..72: mol_type = other DNA

SEQ ID NO: 1213 - DNA, 72 bp, synthetic construct; identical to SEQ ID NO: 98
  source 1..72: mol_type = other DNA

SEQ ID NO: 1214 - DNA, 72 bp, synthetic construct
  source 1..72: mol_type = other DNA
  misc_difference 42: note = a, c, t, g, unknown or other
tccctggtggtctagtggctaggattcggcgctttcaccgcngcggcccgggttcgattcccggtcagggaa

SEQ ID NO: 1215 - DNA, 71 bp, synthetic construct
  source 1..71: mol_type = other DNA
  misc_difference 40: note = a, c, t, g, unknown or other
gcattggtggttcagtggtagaattctcgcctcccacgcnggagacccgggttcgattcccggccaatgca

SEQ ID NO: 1216 - DNA, 71 bp, synthetic construct; identical to SEQ ID NO: 108
  source 1..71: mol_type = other DNA

SEQ ID NO: 1217 - DNA, 72 bp, synthetic construct; identical to SEQ ID NO: 113
  source 1..72: mol_type = other DNA

SEQ ID NO: 1218 - DNA, 74 bp, synthetic construct; identical to SEQ ID NO: 122
  source 1..74: mol_type = other DNA

SEQ ID NO: 1219 - DNA, 74 bp, synthetic construct
  source 1..74: mol_type = other DNA
gctccagtggcgcaatcggttagcgcgcggtacttataatgccgaggttgtgagttcgagcctcacctggagca

SEQ ID NO: 1220 - DNA, 82 bp, synthetic construct; identical to SEQ ID NO: 134
  source 1..82: mol_type = other DNA

SEQ ID NO: 1221 - DNA, 85 bp, synthetic construct
  source 1..85: mol_type = other DNA
  misc_difference 21: note = a, c, t, g, unknown or other
  misc_difference 52: note = a, c, t, g, unknown or other
gtcaggatggccgagtggtcntaaggcgccagactcaagttctggtctccgnatggaggcgtgggttcgaatcccacttctgaca

SEQ ID NO: 1222 - DNA, 83 bp, synthetic construct; identical to SEQ ID NO: 144
  source 1..83: mol_type = other DNA

SEQ ID NO: 1223 - DNA, 83 bp, synthetic construct
  source 1..83: mol_type = other DNA
accaggatggccgagtggttaaggcgttggacttaagatccaatggacagatgtccgcgtgggttcgaaccccactcctggta

SEQ ID NO: 1224 - DNA, 82 bp, synthetic construct
  source 1..82: mol_type = other DNA
  misc_difference 54: note = a, c, t, g, unknown or other
ggtagcgtggccgagcggtctaaggcgctggatttaggctccagtctcttcggnggcgtgggttcgaatcccaccgctgcca

SEQ ID NO: 1225 - DNA, 76 bp, synthetic construct
  source 1..76: mol_type = other DNA
  misc_difference 74: note = a, c, t, g, unknown or other
  misc_difference 75: note = a, c, t, g, unknown or other
  misc_difference 76: note = a, c, t, g, unknown or other
gcccggctagctcagtcggtagagcatgagactcttaatctcagggtcgtgggttcgagccccacgttgggcgnnn

SEQ ID NO: 1226 - DNA, 73 bp, synthetic construct; identical to SEQ ID NO: 167
  source 1..73: mol_type = other DNA

SEQ ID NO: 1227 - DNA, 73 bp, synthetic construct
  source 1..73: mol_type = other DNA
  misc_difference 17: note = a, c, t, g, unknown or other
gccctcttagcgcagtnggcagcgcgtcagtctcataatctgaaggtcctgagttcgagcctcagagagggca

SEQ ID NO: 1228 - DNA, 74 bp, synthetic construct
  source 1..74: mol_type = other DNA
  misc_difference 41: note = a, c, t, g, unknown or other
gccgaaatagctcagttgggagagcgttagactgaagatcntaaaggtccctggttcaatcccgggtttcggca

SEQ ID NO: 1229 - DNA, 72 bp, synthetic construct; identical to SEQ ID NO: 183
  source 1..72: mol_type = other DNA

SEQ ID NO: 1230 - DNA, 72 bp, synthetic construct; identical to SEQ ID NO: 185
  source 1..72: mol_type = other DNA

SEQ ID NO: 1231 - DNA, 72 bp, synthetic construct; identical to SEQ ID NO: 189
  source 1..72: mol_type = other DNA

SEQ ID NO: 1232 - DNA, 82 bp, synthetic construct; identical to SEQ ID NO: 192
  source 1..82: mol_type = other DNA

SEQ ID NO: 1233 - DNA, 82 bp, synthetic construct; identical to SEQ ID NO: 196
  source 1..82: mol_type = other DNA

SEQ ID NO: 1234 - DNA, 84 bp, synthetic construct
  source 1..84: mol_type = other DNA
  misc_difference 8: note = a, c, t, g, unknown or other
  misc_difference 9: note = a, c, t, g, unknown or other
gacgaggnntggccgagtggttaaggcgatggactgctaatccattgtgctctgcacgcgtgggttcgaatcccatcctcgtcg

SEQ ID NO: 1235 - DNA, 82 bp, synthetic construct
  source 1..82: mol_type = other DNA
gtagtcgtggccgagtggttaaggcgatggacttgaaatccattggggtctccccgcgcaggttcgaatcctgccggctacg

SEQ ID NO: 1236 - DNA, 74 bp, synthetic construct; identical to SEQ ID NO: 211
  source 1..74: mol_type = other DNA

SEQ ID NO: 1237 - DNA, 75 bp, synthetic construct
  source 1..75: mol_type = other DNA
  misc_difference 4: note = a, c, t, g, unknown or other
  misc_difference 13: note = a, c, t, g, unknown or other
  misc_difference 17: note = a, c, t, g, unknown or other
  misc_difference 20: note = a, c, t, g, unknown or other
  misc_difference 43: note = a, c, t, g, unknown or other
  misc_difference 51: note = a, c, t, g, unknown or other
  misc_difference 67: note = a, c, t, g, unknown or other
  misc_difference 69: note = a, c, t, g, unknown or other
ggcnctgtggctnagtnggntaaagcgccggtctcgtaaaccnggagatcntgggttcgaatcccancngggcct

SEQ ID NO: 1238 - DNA, 74 bp, synthetic construct
  source 1..74: mol_type = other DNA
  misc_difference 16: note = a, c, t, g, unknown or other
ggctccatagctcagngggttagagcactggtcttgtaaaccaggggtcgcgagttcaaatctcgctggggcct

SEQ ID NO: 1239 - DNA, 72 bp, synthetic construct; identical to SEQ ID NO: 229
  source 1..72: mol_type = other DNA

SEQ ID NO: 1240 - DNA, 73 bp, synthetic construct
  source 1..73: mol_type = other DNA
ccttcgatagctcagctggtagagcggaggactgtagatccttaggtcgctggttcgattccggctcgaagga

SEQ ID NO: 1241 - DNA, 73 bp, synthetic construct; identical to SEQ ID NO: 246
  source 1..73: mol_type = other DNA

SEQ ID NO: 1242 - DNA, 73 bp, synthetic construct; identical to SEQ ID NO: 252
  source 1..73: mol_type = other DNA

SEQ ID NO: 1243 - DNA, 73 bp, synthetic construct; identical to SEQ ID NO: 258
  source 1..73: mol_type = other DNA

SEQ ID NO: 1244 - DNA, 72 bp, synthetic construct; identical to SEQ ID NO: 262
  source 1..72: mol_type = other DNA

SEQ ID NO: 1245 - DNA, 76 bp, synthetic construct
  source 1..76: mol_type = other DNA
  misc_difference 74: note = a, c, t, g, unknown or other
  misc_difference 75: note = a, c, t, g, unknown or other
  misc_difference 76: note = a, c, t, g, unknown or other
ggggaattagctcaagtggtagagcgcttgcttagcatgcaagaggtagtgggatcgatgcccacattctccannn

SEQ ID NO: 1246 - DNA, 75 bp, synthetic construct
  source 1..75: mol_type = other DNA
  misc_difference 73: note = a, c, t, g, unknown or other
  misc_difference 74: note = a, c, t, g, unknown or other
  misc_difference 75: note = a, c, t, g, unknown or other
ggggatgtagctcagtggtagagcgcatgcttcgcatgtatgaggtcccgggttcgatccccggcatctccannn

SEQ ID NO: 1247 - DNA, 75 bp, synthetic construct
  source 1..75: mol_type = other DNA
  misc_difference 73: note = a, c, t, g, unknown or other
  misc_difference 74: note = a, c, t, g, unknown or other
  misc_difference 75: note = a, c, t, g, unknown or other
gggggtgtagctcagtggtagagcgcatgctttgcatgtatgaggccccgggttcgatccccggcacctccannn

SEQ ID NO: 1248 - DNA, 76 bp, synthetic construct
  source 1..76: mol_type = other DNA
  misc_difference 74: note = a, c, t, g, unknown or other
  misc_difference 75: note = a, c, t, g, unknown or other
  misc_difference 76: note = a, c, t, g, unknown or other
gggccagtggcgcaatggataacgcgtctgactacggatcagaagattccaggttcgactcctggctggctcgnnn

SEQ ID NO: 1249 - DNA, 76 bp, synthetic construct
  source 1..76: mol_type = other DNA
  misc_difference 74: note = a, c, t, g, unknown or other
  misc_difference 75: note = a, c, t, g, unknown or other
  misc_difference 76: note = a, c, t, g, unknown or other
ggccgcgtggcctaatggataaggcgtctgattccggatcagaagattgagggttcgagtcccttcgtggtcgnnn

SEQ ID NO: 1250 - DNA, 76 bp, synthetic construct
  source 1..76: mol_type = other DNA
  misc_difference 74: note = a, c, t, g, unknown or other
  misc_difference 75: note = a, c, t, g, unknown or other
  misc_difference 76: note = a, c, t, g, unknown or other
gccccagtggcctaatggataaggcactggcctcctaagccagggattgtgggttcgagtcccacctggggtannn

SEQ ID NO: 1251 - DNA, 76 bp, synthetic construct
  source 1..76: mol_type = other DNA
  misc_difference 74: note = a, c, t, g, unknown or other
  misc_difference 75: note = a, c, t, g, unknown or other
  misc_difference 76: note = a, c, t, g, unknown or other
gaccgcgtggcctaatggataaggcgtctgacttcggatcagaagattgagggttcgagtccctccgtggtcgnnn

SEQ ID NO: 1252 - DNA, 77 bp, synthetic construct
  source 1..77: mol_type = other DNA
  misc_difference 21: note = a, c, t, g, unknown or other
  misc_difference 65: note = a, c, t, g, unknown or other
  misc_difference 75: note = a, c, t, g, unknown or other
  misc_difference 76: note = a, c, t, g, unknown or other
  misc_difference 77: note = a, c, t, g, unknown or other
ggctctgtggcgcaatggatnagcgcattggacttctaattcaaaggttgcgggttcgagtcccnccagagtcgnnn

SEQ ID NO: 1253 - DNA, 78 bp, synthetic construct
  source 1..78: mol_type = other DNA
  misc_difference 43: note = a, c, t, g, unknown or other
  misc_difference 76: note = a, c, t, g, unknown or other
  misc_difference 77: note = a, c, t, g, unknown or other
  misc_difference 78: note = a, c, t, g, unknown or other
gtctctgtggcgcaatcggttagcgcgttcggctgttaaccgnaaaggttggtggttcgagcccacccagggacgnnn

SEQ ID NO: 1254 - DNA, 75 bp, synthetic construct
  source 1..75: mol_type = other DNA
  misc_difference 73: note = a, c, t, g, unknown or other
  misc_difference 74: note = a, c, t, g, unknown or other
  misc_difference 75: note = a, c, t, g, unknown or other
tcctcgttagtatagtggtgagtatccccgcctgtcacgcgggagaccggggttcgattccccgacggggagnnn

SEQ ID NO: 1255 - DNA, 76 bp, synthetic construct
  source 1..76: mol_type = other DNA
  misc_difference 16: note = a, c, t, g, unknown or other
  misc_difference 74: note = a, c, t, g, unknown or other
  misc_difference 75: note = a, c, t, g, unknown or other
  misc_difference 76: note = a, c, t, g, unknown or other
gggggtatagctcagngggtagagcatttgactgcagatcaagaggtccccggttcaaatccgggtgccccctnnn

SEQ ID NO: 1256 - DNA, 75 bp, synthetic construct
  source 1..75: mol_type = other DNA
  misc_difference 20: note = a, c, t, g, unknown or other
  misc_difference 73: note = a, c, t, g, unknown or other
  misc_difference 74: note = a, c, t, g, unknown or other
  misc_difference 75: note = a, c, t, g, unknown or other
ggttccatggtgtaatggtnagcactctggactctgaatccagcgatccgagttcaagtctcggtggaacctnnn

SEQ ID NO: 1257 - DNA, 75 bp, synthetic construct
  source 1..75: mol_type = other DNA
  misc_difference 73: note = a, c, t, g, unknown or other
  misc_difference 74: note = a, c, t, g, unknown or other
  misc_difference 75: note = a, c, t, g, unknown or other
ggtcccatggtgtaatggttagcactctggactttgaatccagcgatccgagttcaaatctcggtgggacctnnn

SEQ ID NO: 1258 - DNA, 75 bp, synthetic construct
  source 1..75: mol_type = other DNA
  misc_difference 73: note = a, c, t, g, unknown or other
  misc_difference 74: note = a, c, t, g, unknown or other
  misc_difference 75: note = a, c, t, g, unknown or other
tccctggtggtctagtggttaggattcggcgctctcaccgccgcggcccgggttcgattcccggtcagggaannn

SEQ ID NO: 1259 - DNA, 75 bp, synthetic construct
  source 1..75: mol_type = other DNA
  misc_difference 42: note = a, c, t, g, unknown or other
  misc_difference 73: note = a, c, t, g, unknown or other
  misc_difference 74: note = a, c, t, g, unknown or other
  misc_difference 75: note = a, c, t, g, unknown or other
tccctggtggtctagtggctaggattcggcgctttcaccgcngcggcccgggttcgattcccggtcagggaannn

SEQ ID NO: 1260 - DNA, 74 bp, synthetic construct
  source 1..74: mol_type = other DNA
  misc_difference 40: note = a, c, t, g, unknown or other
  misc_difference 72: note = a, c, t, g, unknown or other
  misc_difference 73: note = a, c, t, g, unknown or other
  misc_difference 74: note = a, c, t, g, unknown or other
gcattggtggttcagtggtagaattctcgcctcccacgcnggagacccgggttcgattcccggccaatgcannn

SEQ ID NO: 1261 - DNA, 74 bp, synthetic construct
  source 1..74: mol_type = other DNA
  misc_difference 72: note = a, c, t, g, unknown or other
  misc_difference 73: note = a, c, t, g, unknown or other
  misc_difference 74: note = a, c, t, g, unknown or other
gcattggtggttcagtggtagaattctcgcctgccacgcgggaggcccgggttcgattcccggccaatgcannn

SEQ ID NO: 1262 - DNA, 75 bp, synthetic construct
  source 1..75: mol_type = other DNA
  misc_difference 73: note = a, c, t, g, unknown or other
  misc_difference 74: note = a, c, t, g, unknown or other
  misc_difference 75: note = a, c, t, g, unknown or other
gcgttggtggtatagtggtgagcatagctgccttccaagcagttgacccgggttcgattcccggccaacgcannn

SEQ ID NO: 1263 - DNA, 77 bp, synthetic construct
  source 1..77: mol_type = other DNA
  misc_difference 75: note = a, c, t, g, unknown or other
  misc_difference 76: note = a, c, t, g, unknown or other
  misc_difference 77: note = a, c, t, g, unknown or other
ggccggttagctcagttggttagagcgtggtgctaataacgccaaggtcgcgggttcgatccccgtacgggccannn

SEQ ID NO: 1264 - DNA, 77 bp, synthetic construct
  source 1..77: mol_type = other DNA
  misc_difference 75: note = a, c, t, g, unknown or other
  misc_difference 76: note = a, c, t, g, unknown or other
  misc_difference 77: note = a, c, t, g, unknown or other
gctccagtggcgcaatcggttagcgcgcggtacttataatgccgaggttgtgagttcgagcctcacctggagcannn

SEQ ID NO: 1265 - DNA, 85 bp, synthetic construct
  source 1..85: mol_type = other DNA
  misc_difference 83: note = a, c, t, g, unknown or other
  misc_difference 84: note = a, c, t, g, unknown or other
  misc_difference 85: note = a, c, t, g, unknown or other
ggtagcgtggccgagcggtctaaggcgctggattaaggctccagtctcttcgggggcgtgggttcgaatcccaccgctgccannn

SEQ ID NO: 1266 - DNA, 88 bp, synthetic construct
  source 1..88: mol_type = other DNA
  misc_difference 21: note = a, c, t, g, unknown or other
  misc_difference 52: note = a, c, t, g, unknown or other
  misc_difference 86: note = a, c, t, g, unknown or other
  misc_difference 87: note = a, c, t, g, unknown or other
  misc_difference 88: note = a, c, t, g, unknown or other
gtcaggatggccgagtggtcntaaggcgccagactcaagttctggtctccgnatggaggcgtgggttcgaatcccacttctgacannn

SEQ ID NO: 1267 - DNA, 86 bp, synthetic construct
  source 1..86: mol_type = other DNA
  misc_difference 84: note = a, c, t, g, unknown or other
  misc_difference 85: note = a, c, t, g, unknown or other
  misc_difference 86: note = a, c, t, g, unknown or other
gtcaggatggccgagcggtctaaggcgctgcgttcaggtcgcagtctcccctggaggcgtgggttcgaatcccactcctgacannn

SEQ ID NO: 1268 - DNA, 86 bp, synthetic construct
  source 1..86: mol_type = other DNA
  misc_difference 84: note = a, c, t, g, unknown or other
  misc_difference 85: note = a, c, t, g, unknown or other
  misc_difference 86: note = a, c, t, g, unknown or other
accaggatggccgagtggttaaggcgttggacttaagatccaatggacagatgtccgcgtgggttcgaaccccactcctggtannn

SEQ ID NO: 1269 - DNA, 85 bp, synthetic construct
  source 1..85: mol_type = other DNA
  misc_difference 54: note = a, c, t, g, unknown or other
  misc_difference 83: note = a, c, t, g, unknown or other
  misc_difference 84: note = a, c, t, g, unknown or other
  misc_difference 85: note = a, c, t, g, unknown or other
ggtagcgtggccgagcggtctaaggcgctggatttaggctccagtctcttcggnggcgtgggttcgaatcccaccgctgccannn

SEQ ID NO: 1270 - DNA, 79 bp, synthetic construct
  source 1..79: mol_type = other DNA
  misc_difference 74: note = a, c, t, g, unknown or other
  misc_difference 75: note = a, c, t, g, unknown or other
  misc_difference 76: note = a, c, t, g, unknown or other
  misc_difference 77: note = a, c, t, g, unknown or other
  misc_difference 78: note = a, c, t, g, unknown or other
  misc_difference 79: note = a, c, t, g, unknown or other
gcccggctagctcagtcggtagagcatgagactcttaatctcagggtcgtgggttcgagccccacgttgggcgnnnnnn

SEQ ID NO: 1271 - DNA, 76 bp, synthetic construct
  source 1..76: mol_type = other DNA
  misc_difference 74: note = a, c, t, g, unknown or other
  misc_difference 75: note = a, c, t, g, unknown or other
  misc_difference 76: note = a, c, t, g, unknown or other
gcctggatagctcagtcggtagagcatcagacttttaatctgagggtccagggttcaagtccctgttcaggcgnnn

SEQ ID NO: 1272 - DNA, 76 bp, synthetic construct
  source 1..76: mol_type = other DNA
  misc_difference 17: note = a, c, t, g, unknown or other
  misc_difference 74: note = a, c, t, g, unknown or other
  misc_difference 75: note = a, c, t, g, unknown or other
  misc_difference 76: note = a, c, t, g, unknown or other
gccctcttagcgcagtnggcagcgcgtcagtctcataatctgaaggtcctgagttcgagcctcagagagggcannn

SEQ ID NO: 1273 - DNA, 77 bp, synthetic construct
  source 1..77: mol_type = other DNA
  misc_difference 41: note = a, c, t, g, unknown or other
  misc_difference 75: note = a, c, t, g, unknown or other
  misc_difference 76: note = a, c, t, g, unknown or other
  misc_difference 77: note = a, c, t, g, unknown or other
gccgaaatagctcagttgggagagcgttagactgaagatcntaaaggtccctggttcaatcccgggtttcggcannn

SEQ ID NO: 1274 - DNA, 75 bp, synthetic construct
  source 1..75: mol_type = other DNA
  misc_difference 73: note = a, c, t, g, unknown or other
  misc_difference 74: note = a, c, t, g, unknown or other
  misc_difference 75: note = a, c, t, g, unknown or other
ggctcgttggtctaggggtatgattctcgcttaggatgcgagaggtcccgggttcaaatcccggacgagcccnnn

SEQ ID NO: 1275 - DNA, 75 bp, synthetic construct
  source 1..75: mol_type = other DNA
  misc_difference 73: note = a, c, t, g, unknown or other
  misc_difference 74: note = a, c, t, g, unknown or other
  misc_difference 75: note = a, c, t, g, unknown or other
ggctcgttggtctaggggtatgattctcgcttcgggtgcgagaggtcccgggttcaaatcccggacgagcccnnn

SEQ ID NO: 1276 - DNA, 75 bp, synthetic construct
  source 1..75: mol_type = other DNA
  misc_difference 73: note = a, c, t, g, unknown or other
  misc_difference 74: note = a, c, t, g, unknown or other
  misc_difference 75: note = a, c, t, g, unknown or other
ggctcgttggtctaggggtatgattctcgctttgggtgcgagaggtcccgggttcaaatcccggacgagcccnnn

SEQ ID NO: 1277 - DNA, 85 bp, synthetic construct
  source 1..85: mol_type = other DNA
  misc_difference 83: note = a, c, t, g, unknown or other
  misc_difference 84: note = a, c, t, g, unknown or other
  misc_difference 85: note = a, c, t, g, unknown or other
gtagtcgtggccgagtggttaaggcgatggactagaaatccattggggtttccccgcgcaggttcgaatcctgccgactacgnnn

SEQ ID NO: 1278 - DNA, 85 bp, synthetic construct
  source 1..85: mol_type = other DNA
  misc_difference 83: note = a, c, t, g, unknown or other
  misc_difference 84: note = a, c, t, g, unknown or other
  misc_difference 85: note = a, c, t, g, unknown or other
gctgtgatggccgagtggttaaggcgttggactcgaaatccaatggggtctccccgcgcaggttcgaatcctgctcacagcgnnn

SEQ ID NO: 1279 - DNA, 87 bp, synthetic construct
  source 1..87: mol_type = other DNA
  misc_difference 8: note = a, c, t, g, unknown or other
  misc_difference 9: note = a, c, t, g, unknown or other
  misc_difference 85: note = a, c, t, g, unknown or other
  misc_difference 86: note = a, c, t, g, unknown or other
  misc_difference 87: note = a, c, t, g, unknown or other
gacgaggnntggccgagtggttaaggcgatggactgctaatccattgtgctctgcacgcgtgggttcgaatcccatcctcgtcgnnn

SEQ ID NO: 1280 - DNA, 85 bp, synthetic construct
  source 1..85: mol_type = other DNA
  misc_difference 83: note = a, c, t, g, unknown or other
  misc_difference 84: note = a, c, t, g, unknown or other
  misc_difference 85: note = a, c, t, g, unknown or other
gtagtcgtggccgagtggttaaggcgatggacttgaaatccattggggtctccccgcgcaggttcgaatcctgccggctacgnnn

SEQ ID NO: 1281 - DNA, 77 bp, synthetic construct
  source 1..77: mol_type = other DNA
  misc_difference 75: note = a, c, t, g, unknown or other
  misc_difference 76: note = a, c, t, g, unknown or other
  misc_difference 77: note = a, c, t, g, unknown or other
ggctccgtggcttagctggttaaagcgcctgtctagtaaacaggagatcctgggttcgaatcccagcggggcctnnn

SEQ ID NO: 1282 - DNA, 78 bp, synthetic construct
  source 1..78: mol_type = other DNA
  misc_difference 4: note = a, c, t, g, unknown or other
  misc_difference 13: note = a, c, t, g, unknown or other
  misc_difference 17: note = a, c, t, g, unknown or other
  misc_difference 20: note = a, c, t, g, unknown or other
  misc_difference 43: note = a, c, t, g, unknown or other
  misc_difference 51: note = a, c, t, g, unknown or other
  misc_difference 67: note = a, c, t, g, unknown or other
  misc_difference 69: note = a, c, t, g, unknown or other
  misc_difference 76: note = a, c, t, g, unknown or other
  misc_difference 77: note = a, c, t, g, unknown or other
  misc_difference 78: note = a, c, t, g, unknown or other
ggcnctgtggctnagtnggntaaagcgccggtctcgtaaaccnggagatcntgggttcgaatcccancngggcctnnn

SEQ ID NO: 1283 - DNA, 77 bp, synthetic construct
  source 1..77: mol_type = other DNA
  misc_difference 16: note = a, c, t, g, unknown or other
  misc_difference 75: note = a, c, t, g, unknown or other
  misc_difference 76: note = a, c, t, g, unknown or other
  misc_difference 77: note = a, c, t, g, unknown or other
ggctccatagctcagngggttagagcactggtcttgtaaaccaggggtcgcgagttcaaatctcgctggggcctnnn

SEQ ID NO: 1284 - DNA, 75 bp, synthetic construct
  source 1..75: mol_type = other DNA
  misc_difference 73: note = a, c, t, g, unknown or other
  misc_difference 74: note = a, c, t, g, unknown or other
  misc_difference 75: note = a, c, t, g, unknown or other
gacctcgtggcgcaacggtagcgcgtctgactccagatcagaaggttgcgtgttcaaatcacgtcggggtcannn

SEQ ID NO: 1285 - DNA, 76 bp, synthetic construct
  source 1..76: mol_type = other DNA
  misc_difference 74: note = a, c, t, g, unknown or other
  misc_difference 75: note = a, c, t, g, unknown or other
  misc_difference 76: note = a, c, t, g, unknown or other
ccttcgatagctcagctggtagagcggaggactgtagatccttaggtcgctggttcgattccggctcgaaggannn

SEQ ID NO: 1286 - DNA, 76 bp, synthetic construct
  source 1..76: mol_type = other DNA
  misc_difference 74: note = a, c, t, g, unknown or other
  misc_difference 75: note = a, c, t, g, unknown or other
  misc_difference 76: note = a, c, t, g, unknown or other
gtttccgtagtgtagtggttatcacgttcgcctaacacgcgaaaggtccccggttcgaaaccgggcggaaacannn

SEQ ID NO: 1287 - DNA, 76 bp, synthetic construct
  source 1..76: mol_type = other DNA
  misc_difference 74: note = a, c, t, g, unknown or other
  misc_difference 75: note = a, c, t, g, unknown or other
  misc_difference 76: note = a, c, t, g, unknown or other
gtttccgtagtgtagtggttatcacgttcgcctcacacgcgaaaggtccccggttcgaaaccgggcggaaacannn

SEQ ID NO: 1288 - DNA, 76 bp, synthetic construct
  source 1..76: mol_type = other DNA
  misc_difference 74: note = a, c, t, g, unknown or other
  misc_difference 75: note = a, c, t, g, unknown or other
  misc_difference 76: note = a, c, t, g, unknown or other
ggttccatagtgtagtggttatcacgtctgctttacacgcagaaggtcctgggttcgagccccagtggaaccannn

SEQ ID NO: 1289 - DNA, 75 bp, synthetic construct
  source 1..75: mol_type = other DNA
  misc_difference 73: note = a, c, t, g, unknown or other
  misc_difference 74: note = a, c, t, g, unknown or other
  misc_difference 75: note = a, c, t, g, unknown or other
agcagagtggcgcagcggaagcgtgctgggcccataacccagaggtcgatggatcgaaaccatcctctgctannn
